(19) United States
(12) Patent Application Publication
(10) Pub. No.: US 2024/0287513 A1
(43) Pub. Date: Aug. 29, 2024

(54) Compounds and Methods for Modulating Splicing of Pre-MRNA

(71) Applicant: Ionis Pharmaceuticals, Inc., Carlsbad, CA (US)

(72) Inventors: Frank Rigo, Carlsbad, CA (US); Paymaan Jafar-Nejad, Carlsbad, CA (US)

(73) Assignee: Ionis Pharmaceuticals, Inc., Carlsbad, CA (US)

(21) Appl. No.: 18/363,244

(22) Filed: Aug. 1, 2023

Related U.S. Application Data
(63) Continuation of application No. 17/904,866, filed on Aug. 23, 2022, now abandoned.
(60) Provisional application No. 63/085,109, filed on Sep. 29, 2020.
(60) Provisional application No. 62/983,573, filed on Feb. 28, 2020.

(51) Int. Cl. C12N 15/113

(52) U.S. Cl. CPC C12N 15/113; C12N 2310/11; C12N 2310/315; C12N 2310/322; C12N 2310/3341; C12N 2310/345; C12N 2310/346

(57) ABSTRACT

Provided are compounds, methods, and pharmaceutical compositions for modulating splicing of a pre-mRNA in a cell or subject. Such compounds, methods, and pharmaceutical compositions are useful to ameliorate at least one symptom of a disease or disorder.

### SEQUENCE LISTING

[0001] The present application contains a sequence listing that has been submitted electronically in XML format. Said XML copy, created on Jul. 27, 2023, is named “CORE0158SEQ.xml” and is 5,280,742 bytes in size. The information in the electronic format of the sequence listing is incorporated herein by reference in its entirety.

### FIELD

[0002] Provided are compounds, methods, and pharmaceutical compositions for modulating splicing of pre-mRNA in a cell or subject. Such compounds, methods, and pharmaceutical compositions are useful to ameliorate at least one symptom of a disease or disorder.

### BACKGROUND

[0003] Newly synthesized RNA molecules, such as primary transcripts or pre-mRNA, are processed to form a transcript with a different nucleobase sequence and/or different chemical modifications relative to the unprocessed form. Processing of pre-mRNAs includes splicing of the pre-mRNA to form a corresponding mRNA. Introns are removed, and exons remain and are spliced together to form the mature mRNA sequence. Splice junctions are also referred to as splice sites with the 5′ side of the junction often called the “5′ splice site,” or “splice donor site” and the 3′ side the “3′ splice site” or “splice acceptor site.” In splicing, the 3′ end of an upstream exon is joined to the 5′ end of the downstream exon. Thus, the unspliced, pre-mRNA has an exon/intron junction at the 5′ end of an intron and an intron/exon junction at the 3′ end of an intron. After the intron is removed, the exons are contiguous at what is sometimes referred to as the exon/exon junction or boundary in the mature mRNA. Cryptic splice sites are those which are less often used but may be used when the usual splice site is blocked or unavailable. Alternative splicing, defined as the splicing together of different combinations of exons, often results in the formation of multiple mRNA transcripts from a single gene.

[0004] Up to 50% of human genetic diseases resulting from a point mutation are caused by aberrant splicing. Such point mutations can either disrupt a current splice site or create a new splice site, resulting in mRNA transcripts comprised of a different combination of exons or with deletions in exons. Point mutations also can result in activation of a cryptic splice site or disrupt regulatory cis elements (i.e., splicing enhancers or silencers) (Cartegni et al., Nat. Rev. Genet., 2002, 3, 285-298; Krawczak et al., Hum. Genet., 1992, 90, 41-54).

[0005] Antisense oligonucleotides have been used to target mutations that lead to aberrant splicing in order to redirect splicing to give a desired splice product (Kole, Acta Biochimica Polonica, 1997, 44, 231-238). Phosphorothioate 2′-O-methyl oligoribonucleotides have been used to target the aberrant 5′ splice site of the mutant β-globin gene found in patients with β-thalassemia, a genetic blood disorder.

[0006] Antisense oligonucleotides have also been used to modulate splicing of pre-mRNA containing a mutation that does not cause aberrant splicing but that can be mitigated by altering splicing. For example, antisense oligonucleotides have been used to modulate mutant dystrophin splicing (Dunckley et al. Nucleosides & Nucleotides, 1997, 16, 1665-1668).

[0007] Antisense compounds have been used to block cryptic splice sites to restore normal splicing of HBB β-globin) and CFTR genes in cell lines derived from β-thalassemia or cystic fibrosis patients, respectively (Lacerra et al., Proc. Natl. Acad. Sci. USA, 2000, 97, 9591-9596; Friedman et al., J Biol. Chem., 1999, 274, 36193-36199). Antisense compounds have also been used to alter the ratio of the long and short forms of Bcl-x pre-mRNA (U.S. Pat. Nos. 6,172,216; 6,214,986; Taylor et al., Nat. Biotechnol. 1999, 17, 1097-1100) or to force skipping of specific exons containing premature termination codons (Wilton et al., Neuromuscul. Disord., 1999, 9, 330-338).

[0008] Antisense technology is an effective means for modulating the expression of one or more specific gene products, including alternative splice products, and is uniquely useful in a number of therapeutic, diagnostic, and research applications. The principle behind antisense technology is that an antisense compound, which hybridizes to a target nucleic acid, modulates activities such as transcription, splicing or translation through one of a number of antisense mechanisms. The sequence specificity of antisense compounds makes them extremely attractive as tools for target validation and gene functionalization, as well as therapeutics to selectively modulate the expression of genes involved in disease.

### SUMMARY OF THE INVENTION

[0009] Provided herein are oligomeric compounds for modulating splicing of a selected pre-mRNA. In certain embodiments, oligomeric compounds have phosphorothioate internucleoside linkages and phosphodiester internucleoside linkages. In certain embodiments, the internucleoside linkage motif imparts improved tolerabily of the oligomeric compound. In certain embodiments, the internucleoside linkage motif imparts improved neurotolerability of the oligomeric compound. In certain embodiments, the internucleoside linkage motif imparts improved activity of the oligomeric compound. In certain embodiments, each nucleoside of the modified oligonucleotide is either a sugar-modified nucleoside or a DNA nucleoside. In certain embodiments, the modified oligonucleotide comprises 1, 2, 3, 4, 5, 6, 7, 8, 9, 10, 11, 12, 13, 14, 15, 16, 17, 18, 19, or 20 sugar-modified nucleosides. In certain embodiments, the oligomeric compound comprises not more than 1, 2, 3, or 4 DNA nucleosides. In certain embodiments, the oligomeric compound is a modified oligonucleotide.

### DETAILED DESCRIPTION OF THE INVENTION

[0010] It is to be understood that both the foregoing general description and the following detailed description are exemplary and explanatory only and are not restrictive. Herein, the use of the singular includes the plural unless specifically stated otherwise. As used herein, the use of “or” means “and/or” unless stated otherwise. Furthermore, the use of the term “including” as well as other forms, such as “includes” and “included”, is not limiting. Also, terms such as “element” or “component” encompass both elements and components comprising one unit and elements and components that comprise more than one subunit, unless specifically stated otherwise.

[0011] The section headings used herein are for organizational purposes only and are not to be construed as limiting the subject matter described. All documents, or portions of documents, cited in this application, including, but not limited to, patents, patent applications, articles, books, and treatises, and GenBank and NCBI reference sequence records are hereby expressly incorporated-by-reference for the portions of the document discussed herein, as well as in their entirety.

### Definitions

[0012] Unless specific definitions are provided, the nomenclature used in connection with, and the procedures and techniques of, analytical chemistry, synthetic organic chemistry, and medicinal and pharmaceutical chemistry described herein are those well-known and commonly used in the art. Where permitted, all patents, applications, published applications and other publications and other data referred to throughout in the disclosure are incorporated by reference herein in their entirety.

[0013] Unless otherwise indicated, the following terms have the following meanings:

[0014] As used herein, “2′-deoxyribonucleoside” means a nucleoside comprising a 2′-H(H) deoxyribosyl sugar moiety. In certain embodiments, a 2′-deoxyribonucleoside is a 2′-β-D deoxyribonucleoside and comprises a 2′-β-D-deoxyribosyl sugar moiety, which has the β-D configuration as found in naturally occurring deoxyribonucleic acids (DNA). In certain embodiments, a 2′-deoxyribonucleoside may comprise a modified nucleobase or may comprise an RNA nucleobase (uracil).

[0015] As used herein, “2′-MOE” means a 2′-OCH₂CH₂OCH₃ group in place of the 2′—OH group of a ribosyl sugar moiety. A “2′-MOE sugar moiety” is a sugar moiety with a 2′-OCH₂CH₂OCH₃ group in place of the 2′—OH group of a ribosyl sugar moiety. Unless otherwise indicated, a 2′-MOE sugar moiety is in the β-D configuration. “MOE” means O-methoxyethyl.

[0016] As used herein, “2′-MOE nucleoside” means a nucleoside comprising a 2′-MOE sugar moiety.

[0017] As used herein, “2′-NMA” means a —O—CH₂—C(═O)—NH—CH₃ group in place of the 2′—OH group of a ribosyl sugar moiety. A “2′-NMA sugar moiety” is a sugar moiety with a 2′-O—CH₂—C(═O)—NH—CH₃ group in place of the 2′-OH group of a ribosyl sugar moiety. Unless otherwise indicated, a 2′-NMA sugar moiety is in the β-D configuration. “NMA” means O—N-methyl acetamide.

[0018] As used herein, “2′-NMA nucleoside” means a nucleoside comprising a 2′-NMA sugar moiety.

[0019] As used herein, “2′-OMe” means a 2′-OCH₃ group in place of the 2′—OH group of a ribosyl sugar moiety. A “2′-OMe sugar moiety” is a sugar moiety with a 2′-OCH₃ group in place of the 2′—OH group of a ribosyl sugar moiety. Unless otherwise indicated, a 2′-MOE sugar moiety is in the β-D configuration. “OMe” means O-methyl.

[0020] As used herein, “2′-OMe nucleoside” means a nucleoside comprising a 2′-OMe sugar moiety.

[0021] As used herein, “2′-substituted nucleoside” means a nucleoside comprising a 2′-substituted sugar moiety. As used herein, “2′-substituted” in reference to a sugar moiety means a sugar moiety comprising at least one 2′-substituent group other than H or OH.

[0022] As used herein, “5-methyl cytosine” means a cytosine modified with a methyl group attached to the 5 position. A 5-methyl cytosine is a modified nucleobase.

[0023] As used herein, “administering” means providing a pharmaceutical agent to a subject.

[0024] As used herein, “ameliorate” in reference to a treatment means improvement in at least one symptom relative to the same symptom in the absence of the treatment. In certain embodiments, amelioration is the reduction in the severity or frequency of a symptom, or the delayed onset or slowing of progression in the severity or frequency of a symptom. In certain embodiments, the symptom is reduced muscle strength; inability or reduced ability to sit upright, to stand, and/or walk; reduced neuromuscular activity; reduced electrical activity in one or more muscles; reduced respiration; inability or reduced ability to eat, drink, and/or breathe without assistance; loss of weight or reduced weight gain; and/or decreased survival.

[0025] As used herein, “antisense activity” means any detectable and/or measurable change attributable to the hybridization of an antisense compound to its target nucleic acid.

[0026] As used herein, “antisense compound” means an oligomeric compound or oligomeric duplex capable of achieving at least one antisense activity.

[0027] As used herein, “bicyclic nucleoside” or “BNA” means a nucleoside comprising a bicyclic sugar moiety.

[0028] As used herein, “bicyclic sugar” or “bicyclic sugar moiety” means a modified sugar moiety comprising two rings, wherein the second ring is formed via a bridge connecting two of the atoms in the first ring thereby forming a bicyclic structure. In certain embodiments, the first ring of the bicyclic sugar moiety is a furanosyl moiety. In certain embodiments, the furanosyl moiety is a ribosyl moiety. In certain embodiments, the bicyclic sugar moiety does not comprise a furanosyl moiety.

[0029] As used herein, a “block of phosphodiester internucleoside linkages” means a single phosphodiester internucleoside linkage or two or more contiguous phosphodiester internucleoside linkages that are either flanked on each side by at least one phosphorothioate internucleoside linkage (an internal block) or are located at one end of a modified oligonucleotide (terminal block) and so one side of the block is the end of the modified oligonucleotide and the other side of the block is adjacent to at least one phosphorothioate internucleoside linkage.

[0030] As used herein, “cerebrospinal fluid” or “CSF” means the fluid filling the space around the brain and spinal cord. “Artificial cerebrospinal fluid” or “aCSF” means a prepared or manufactured fluid that has certain properties of cerebrospinal fluid.

[0031] As used herein, “cEt” means a 4′ to 2′ bridge in place of the 2′OH-group of a ribosyl sugar moiety, wherein the bridge has the formula of 4′-CH(CH₃)—O-2′, and wherein the methyl group of the bridge is in the S configuration. A “cEt sugar moiety” is a bicyclic sugar moiety with a 4′ to 2′ bridge in place of the 2′OH-group of a ribosyl sugar moiety, wherein the bridge has the formula of 4′-CH(CH₃)—O-2′, and wherein the methyl group of the bridge is in the S configuration. “cEt” means constrained ethyl.

[0032] As used herein, “cEt nucleoside” means a nucleoside comprising a cEt sugar moiety.

[0033] As used herein, “chirally enriched population” means a plurality of molecules of identical molecular formula, wherein the number or percentage of molecules within the population that contain a particular stereochemical configuration at a particular chiral center is greater than the number or percentage of molecules expected to contain the same particular stereochemical configuration at the same particular chiral center within the population if the particular chiral center were stereorandom. Chirally enriched populations of molecules having multiple chiral centers within each molecule may contain one or more stereorandom chiral centers. In certain embodiments, the molecules are modified oligonucleotides. In certain embodiments, the molecules are compounds comprising modified oligonucleotides.

[0034] As used herein, “complementary” in reference to an oligonucleotide means that at least 70% of the nucleobases of the oligonucleotide or one or more portions thereof and the nucleobases of another nucleic acid or one or more portions thereof are capable of hydrogen bonding with one another when the nucleobase sequence of the oligonucleotide and the other nucleic acid are aligned in opposing directions. Complementary nucleobases means nucleobases that are capable of forming hydrogen bonds with one another. Complementary nucleobase pairs include adenine (A) with thymine (T), adenine (A) with uracil (U), cytosine (C) with guanine (G), and 5-methyl cytosine (mC) with guanine (G). Complementary oligonucleotides and/or target nucleic acids need not have nucleobase complementarity at each nucleoside. Rather, some mismatches are tolerated. As used herein, “fully complementary” or “100% complementary” in reference to an oligonucleotide, or a portion thereof, means that the oligonucleotide, or portion thereof, is complementary to another oligonucleotide or target nucleic acid at each nucleobase of the shorter of the two oligonucleotides, or at each nucleoside if the oligonucleotides are the same length.

[0035] As used herein, “contiguous” in the context of an oligonucleotide refers to nucleosides, nucleobases, sugar moieties, or internucleoside linkages that are immediately adjacent to each other. For example, “contiguous nucleobases” means nucleobases that are immediately adjacent to each other in a sequence.

[0036] As used herein, a “DNA nucleoside” is a 2′-β-D-deoxyribonucleoside, and comprises a 2′-β-D-deoxyribosyl sugar moiety.

[0037] As used herein, “hybridization” means the pairing or annealing of complementary oligonucleotides and/or nucleic acids. While not limited to a particular mechanism, the most common mechanism of hybridization involves hydrogen bonding, which may be Watson-Crick, Hoogsteen or reversed Hoogsteen hydrogen bonding, between complementary nucleobases.

[0038] As used herein, “internucleoside linkage” means the covalent linkage between contiguous nucleosides in an oligonucleotide. As used herein, “modified internucleoside linkage” means any internucleoside linkage other than a phosphodiester internucleoside linkage. “Phosphorothioate internucleoside linkage” is a modified internucleoside linkage in which one of the non-bridging oxygen atoms of a phosphodiester internucleoside linkage is replaced with a sulfur atom.

[0039] As used herein, “intron retention” means that following splicing of the pre-mRNA, an intron present in the pre-mRNA is present, or retained, in the mRNA.

[0040] As used herein, “mismatch” or “non-complementary” means a nucleobase of a first oligonucleotide that is not complementary with the corresponding nucleobase of a second oligonucleotide or target nucleic acid when the first and second oligonucleotide are aligned.

[0041] As used herein, “motif” means the pattern of unmodified and/or modified sugar moieties, nucleobases, and/or internucleoside linkages, in an oligonucleotide.

[0042] As used herein, “non-bicyclic modified sugar moiety” means a modified sugar moiety that comprises a modification, such as a substituent, that does not form a bridge between two atoms of the sugar to form a second ring.

[0043] As used herein, a “substrate for nonsense mediated decay” is an RNA that comprises a nucleobase sequence, such as, for example, an NMD-inducing exon, that can activate the nonsense mediated decay pathway.

[0044] As used herein, “nucleobase” means an unmodified nucleobase or a modified nucleobase. As used herein an “unmodified nucleobase” is adenine (A), thymine (T), cytosine (C), uracil (U), or guanine (G). As used herein, a “modified nucleobase” is a group of atoms other than unmodified A, T, C, U, or G capable of pairing with at least one unmodified nucleobase. A “5-methyl cytosine” is a modified nucleobase. A universal base is a modified nucleobase that can pair with any one of the five unmodified nucleobases. As used herein, “nucleobase sequence” means the order of contiguous nucleobases in a target nucleic acid or oligonucleotide independent of any sugar or internucleoside linkage modification.

[0045] As used herein, “nucleoside” means a compound comprising a nucleobase and a sugar moiety. The nucleobase and sugar moiety are each, independently, unmodified or modified. As used herein, “modified nucleoside” means a nucleoside comprising a modified nucleobase and/or a modified sugar moiety. “Linked nucleosides” are nucleosides that are connected in a contiguous sequence (i.e., no additional nucleosides are presented between those that are linked).

[0046] As used herein, “sugar-modified nucleoside” means a nucleoside comprising a modified sugar moiety.

[0047] As used herein, “oligomeric compound” means an oligonucleotide and optionally one or more additional features, such as a conjugate group or terminal group. An oligomeric compound may be paired with a second oligomeric compound that is complementary to the first oligomeric compound or may be unpaired. A “singled-stranded oligomeric compound” is an unpaired oligomeric compound. The term “oligomeric duplex” means a duplex formed by two oligomeric compounds having complementary nucleobase sequences. Each oligomeric compound of an oligomeric duplex may be referred to as a “duplexed oligomeric compound.”

[0048] As used herein, “oligonucleotide” means a strand of linked nucleosides connected via internucleoside linkages, wherein each nucleoside and internucleoside linkage may be modified or unmodified. Unless otherwise indicated, oligonucleotides consist of 8-50 linked nucleosides. As used herein, “modified oligonucleotide” means an oligonucleotide, wherein at least one nucleoside or internucleoside linkage is modified. As used herein, “unmodified oligonucleotide” means an oligonucleotide that does not comprise any nucleoside modifications or internucleoside modifications.

[0049] As used herein, “pharmaceutical composition” means a mixture of substances suitable for administering to a subject. For example, a pharmaceutical composition may comprise an oligomeric compound and a sterile aqueous solution.

[0050] As used herein, “pharmaceutically acceptable carrier or diluent” means any substance suitable for use in administering to a subject. Certain such carriers enable pharmaceutical compositions to be formulated as, for example, tablets, pills, dragees, capsules, liquids, gels, syrups, slurries, suspension, and lozenges for the oral ingestion by a subject. In certain embodiments, a pharmaceutically acceptable carrier or diluent is sterile water, sterile saline, sterile buffer solution, or sterile artificial cerebrospinal fluid.

[0051] As used herein, “pharmaceutically acceptable salts” means physiologically and pharmaceutically acceptable salts of compounds. Pharmaceutically acceptable salts retain the desired biological activity of the parent compound and do not impart undesired toxicological effects thereto.

[0052] As used herein, “RNA” means an RNA transcript and includes pre-mRNA and mature mRNA unless otherwise specified.

[0053] As used herein, “splice modulation site” is any portion of a pre-mRNA that, when bound by an oligomeric compound alters splicing of the pre-mRNA compared to the splicing that occurs in the absence of the oligomeric compound. In certain embodiments, a “splice modulation site” is a splice acceptor site. In certain embodiments, a “splice modulation site” is a splice donor site”. In certain embodiments, a “splice modulation site” is a cryptic splice site. In certain embodiments, a “splice modulation site” is an intron/exon junction. In certain embodiments, a “splice modulation site” is located within 50 nucleotides or within 100 nucleotides of an intron/exon junction. In certain embodiments, a splice modulation site is a binding site for proteins that are involved in splicing.

[0054] As used herein, “stereorandom chiral center” in the context of a population of molecules of identical molecular formula means a chiral center having a random stereochemical configuration. For example, in a population of molecules comprising a stereorandom chiral center, the number of molecules having the (S) configuration of the stereorandom chiral center may be but is not necessarily the same as the number of molecules having the (R) configuration of the stereorandom chiral center. The stereochemical configuration of a chiral center is considered random when it is the result of a synthetic method that is not designed to control the stereochemical configuration. In certain embodiments, a stereorandom chiral center is a stereorandom phosphorothioate internucleoside linkage.

[0055] As used herein, “subject” means a human or non-human animal.

[0056] As used herein, “sugar moiety” means an unmodified sugar moiety or a modified sugar moiety. As used herein, “unmodified sugar moiety” means a 2′-OH(H) β-D ribosyl moiety, as found in RNA (an “unmodified RNA sugar moiety”), or a 2′-H(H) β-D deoxyribosyl moiety, as found in DNA (an “unmodified DNA sugar moiety”). Unmodified sugar moieties have one hydrogen at each of the 1′, 3′, and 4′ positions, an oxygen at the 3′ position, and two hydrogens at the 5′ position. As used herein, “modified sugar moiety” or “modified sugar” means a modified furanosyl sugar moiety or a sugar surrogate.

[0057] As used herein, “sugar surrogate” means a modified sugar moiety having other than a furanosyl moiety that can link a nucleobase to another group, such as an internucleoside linkage, conjugate group, or terminal group in an oligonucleotide. Modified nucleosides comprising sugar surrogates can be incorporated into one or more positions within an oligonucleotide and such oligonucleotides are capable of hybridizing to complementary oligomeric compounds or target nucleic acids.

[0058] As used herein, “standard in vivo assay” means the assay described in Example 2 and reasonable variations thereof.

[0059] As used herein, “symptom” means any physical feature or test result that indicates the existence or extent of a disease or disorder. In certain embodiments, a symptom is apparent to a subject or to a medical professional examining or testing the subject.

[0060] As used herein, “target nucleic acid” means a nucleic acid that an antisense compound is designed to affect.

[0061] As used herein, “target region” means a portion of a target nucleic acid to which an oligomeric compound is designed to hybridize.

[0062] As used herein, “terminal group” means a chemical group or group of atoms that is covalently linked to a terminus of an oligonucleotide.

[0063] As used herein, “therapeutically effective amount” means an amount of a pharmaceutical agent that provides a therapeutic benefit to a subject. For example, a therapeutically effective amount improves a symptom of a disease.

### Certain Embodiments

[0064] The present disclosure provides the following non-limiting numbered embodiments:

Embodiment 1. An oligomeric compound comprising a modified oligonucleotide consisting of 16-20 linked nucleosides, wherein:
[0065] each nucleoside of the modified oligonucleotide is either a sugar-modified nucleoside or a DNA nucleoside, provided that not more than 4 nucleosides are DNA nucleosides; and
[0066] the modified oligonucleotide comprises 1-4 blocks of phosphodiester linkages, wherein each block of phosphodiester linkages consists of a single phosphodiester linkage or of 2-4 contiguous phosphodiester linkages; and wherein each of the remaining internucleoside linkages is a phosphorothioate linkage.
   Embodiment 2. The oligomeric compound of embodiment 1, wherein 4 nucleosides of the modified oligonucleotide are DNA nucleosides.
   Embodiment 3. The oligomeric compound of embodiment 1, wherein 3 nucleosides of the modified oligonucleotide are DNA nucleosides.
   Embodiment 4. The oligomeric compound of embodiment 1, wherein 2 nucleosides of the modified oligonucleotide are DNA nucleosides.
   Embodiment 5. The oligomeric compound of embodiment 1, wherein 1 nucleoside of the modified oligonucleotide is a DNA nucleoside.
   Embodiment 6. The oligomeric compound of embodiment 2, wherein the 4 DNA nucleotides of the modified oligonucleotide are non-contiguous.
   Embodiment 7. The oligomeric compound of any of embodiments 1-6, wherein the 5′ terminal nucleoside of the modified oligonucleotide is a DNA nucleoside.
   Embodiment 8. The oligomeric compound of any of embodiments 1-7, wherein the 3′ terminal nucleoside of the modified oligonucleotide is a DNA nucleoside.
   Embodiment 9. The oligomeric compound of any of embodiments 1-8, wherein the 5′ penultimate nucleoside of the modified oligonucleotide is a DNA nucleoside.
   Embodiment 10. The oligomeric compound of any of embodiments 1-9, wherein the 3′ penultimate nucleoside of the modified oligonucleotide is a DNA nucleoside.
   Embodiment 11. The oligomeric compound of embodiment 1, wherein each nucleoside of the modified oligonucleotide is a sugar-modified nucleoside.
   Embodiment 12. The oligomeric compound of any of embodiments 1-11, wherein at least one sugar-modified nucleoside of the modified oligonucleotide is a 2′-substituted nucleoside.
   Embodiment 13. The oligomeric compound of any of embodiments 1-12, wherein at least one sugar-modified nucleoside of the modified oligonucleotide is a bicyclic nucleoside.
   Embodiment 14. The oligomeric compound of any of embodiments 1-12, wherein each sugar-modified nucleoside of the modified oligonucleotide is either a 2′-substituted nucleoside or a bicyclic nucleoside.
   Embodiment 15. The oligomeric compound of any of embodiments 1-11, wherein each sugar-modified nucleoside of the modified oligonucleotide is a 2′-substituted nucleoside.
   Embodiment 16. The oligomeric compound of any of embodiments 1-11, wherein each sugar-modified nucleoside of the modified oligonucleotide is a bicyclic nucleoside.
   Embodiment 17. The oligomeric compound of any of embodiments 12, 14, 15 wherein at least one 2′-substituted nucleoside is selected from a 2′-MOE nucleoside, a 2′-NMA nucleoside, and a 2′-OMe nucleoside.
   Embodiment 18. The oligomeric compound of any of embodiments 12, 14, 15 wherein each 2′-substituted nucleoside is independently selected from a 2′-MOE nucleoside, a 2′-NMA nucleoside, and a 2′-OMe nucleoside.
   Embodiment 19. The oligomeric compound of any of embodiments 12, 14, 15 wherein at least one 2′-substituted nucleoside is a 2′-MOE nucleoside.
   Embodiment 20. The oligomeric compound of any of embodiments 12, 14, 15 wherein each 2′-substituted nucleoside is a 2′-MOE nucleoside.
   Embodiment 21. The oligomeric compound of any of embodiments 12, 14, 15 wherein at least one 2′-substituted nucleoside is a 2′-NMA nucleoside.
   Embodiment 22. The oligomeric compound of any of embodiments 12, 14, 15 wherein each 2′-substituted nucleoside is a 2′-NMA nucleoside.
   Embodiment 23. The oligomeric compound of any of embodiments 13, 14, or 16-22, wherein at least one bicyclic nucleoside is selected from a cEt nucleoside, an LNA nucleoside, and an ENA nucleoside.
   Embodiment 24. The oligomeric compound of any of embodiments 13, 14, or 16-22, wherein each bicyclic nucleoside is selected from: a cEt nucleoside, an LNA nucleoside, and an ENA nucleoside.
   Embodiment 25. The oligomeric compound of embodiment 1, wherein the modified oligonucleotide has a sugar motif (5′ to 3′) selected from: eeeeeeeeeeeeeeeeeeee, eeeeeeeeeeeeeeeeeee, eeeeeeeeeeeeeeeeee, eeeeeeeeeeeeeeeee, eeeeeeeeeeeeeeee, nnnnnnnnnnnnnnnn, nnnnnnnnnnnnnnnnn, mnnnnnnnnnnnnnnnnnn, nnnnnnnnnnnnnnnnnnn, nnnnnnnmnummnnnmnmnn nennnnneneennnnnnn, nnnnnnnnnnnnenneen, nennnnneneenenneen, nnnnnnnnnnnnnnnnnnne, nnnnnnnnnnnnnnnnnnd, nnnnnnnnnnnnnnnnnny, nnnnnnnnnnnnnnnnnndd, nnnnnnnnnnnnnnnnnned, nnnnnnnnnnnnnnnnnnde, nnnnnnnnnnnnnnnnnnee, eeeeeeeeeeeeeeeeeedd, eeeeeeeeeeeeeeeeeeed, eeeeeeeeeeeeeeeeeede, nnnnnnnnnnnnnnnnnnd, nnnnnnnnnnnnnnnnnne, eeeeeeeeeeeeeeeeeed, keekeekeekeekeeeek, keeekeeekeeekeeeek, keeeeekeeeeekeeeek, keeeeeeekeeeeeeeek, keeeeeeeeeeeeeeeek, eeekeekeekeekeekek, eeekeekeekeekeekee, eeeeeekeekeekeekee, eeeeeekeekeekeeeee, eeeeeekeeeeekeeeee, keekeekeekeeeeeeee, eeeeeeeekeekeekeek, keekeekeeeeeeeeeee, eeeeeeeeeeekeekeek, keekeeeeeeeeeeeeee, eeeeeeeeeeeeeekeek, keekeekeekeekeeek, keeekeeekeeekeeek, keeeekeeeeekeeeek, keeeeeeekeeeeeeek, keeeeeeeeeeeeeeek, eekeekeekeekeekek, eekeekeekeekeekee, eeeeekeekeekeekee, eeeeekeekeekeeeee, eeeeekeeeeekeeeee, keekeekeekeeeeeee, eeeeeeekeekeekeek, keekeekeeeeeeeeee, eeeeeeeeeekeekeek, keekeeeeeeeeeeeee, eeeeeeeeeeeeekeek, keekeekeekeekeek, keeekeeekeeekeek, keeeekeeeekeeeek, keeeeeeekeeeeeek, keeeeeeeeeeeeeek, kekeekeekeekeeke, eekeekeekeekeeke, eeeeekeekeekeeke, eeeeekeekeekeeee, eeeeekeeeeekeeee, keekeekeekeeeeee, eeeeeekeekeekeek, keekeekeeeeeeeee, eeeeeeeeekeekeek, keekeeeeeeeeeeee, eeeeeeeeeeeekeek, eeeeeeeeeeeeeeeeeed, eeeeeeeeeeeeeeeeeey, ennnnnnnnnnnnnnnnnn, and ennnnnnnnnnnnnnnnnne; wherein ‘e’ represents a 2′-MOE sugar moiety, ‘n’ represents a 2′-NMA sugar moiety, ‘k’ represents a cEt sugar moiety, ‘d’ represents a 2′-β-D-deoxyribosyl sugar moiety, and ‘y’ represents a 2′-OMe sugar moiety.
   Embodiment 26. The oligomeric compound of any of embodiments 1-25, wherein the modified oligonucleotide comprises 4 blocks of phosphodiester linkages.
   Embodiment 27. The oligomeric compound of any of embodiments 1-25, wherein the modified oligonucleotide comprises 3 blocks of phosphodiester linkages.
   Embodiment 28. The oligomeric compound of any of embodiments 1-25, wherein the modified oligonucleotide comprises 2 blocks of phosphodiester linkages.
   Embodiment 29. The oligomeric compound of any of embodiments 1-25, wherein the modified oligonucleotide comprises 1 block of phosphodiester linkages.
   Embodiment 30. The oligomeric compound of any of embodiments 1-29, wherein at least one block of phosphodiester linkages consists of 4 contiguous phosphodiester linkages.
   Embodiment 31. The oligomeric compound of any of embodiments 1-29, wherein at least one block of phosphodiester linkages consists of 3 contiguous phosphodiester linkages.
   Embodiment 32. The oligomeric compound of any of embodiments 1-29, wherein at least one block of phosphodiester linkages consists of 2 contiguous phosphodiester linkages.
   Embodiment 33. The oligomeric compound of any of embodiments 1-29, wherein each block of phosphodiester linkages consists of 1 or 2 contiguous phosphodiester linkages.
   Embodiment 34. The oligomeric compound of any of embodiments 1-29, wherein at least one block of phosphodiester linkages consists of 1 phosphodiester linkage.
   Embodiment 35. The oligomeric compound of any of embodiments 1-29, wherein each block of phosphodiester linkages consists of 1 phosphodiester linkage.
   Embodiment 36. The oligomeric compound of any of embodiments 1-35, wherein the 5′-terminal internucleoside linkage of the modified oligonucleotide is a phosphodiester linkage.
   Embodiment 37. The oligomeric compound of any of embodiments 1-36, wherein the 3′-terminal internucleoside linkage of the modified oligonucleotide is a phosphodiester linkage.
   Embodiment 38. The oligomeric compound of any of embodiments 1-37, wherein the 5′-penultimate internucleoside linkage of the modified oligonucleotide is a phosphodiester linkage.
   Embodiment 39. The oligomeric compound of any of embodiments 1-38, wherein the 3′-penultimate internucleoside linkage is a phosphodiester linkage.
   Embodiment 40. The oligomeric compound of any of embodiments 1-39, wherein the 4^{th} internucleoside linkage from the 5′-end of the modified oligonucleotide is a phosphodiester linkage.
   Embodiment 41. The oligomeric compound of any of embodiments 1-40, wherein at least one phosphodiester block is within the first 8 internucleoside linkages from the 5′-end of the modified oligonucleotide.
   Embodiment 42. The oligomeric compound of any of embodiments 1-40, wherein at least one phosphodiester block is within the first 6 internucleoside linkages from the 5′-end of the modified oligonucleotide.
   Embodiment 43. The oligomeric compound of any of embodiments 1-40, wherein at least one phosphodiester block is within the first 4 internucleoside linkages from the 5′-end of the modified oligonucleotide.
   Embodiment 44. The oligomeric compound of any of embodiments 1-40, wherein at least one phosphodiester block is within the first 2 internucleoside linkages from the 5′-end of the modified oligonucleotide.
   Embodiment 45. The oligomeric compound of any of embodiments 1-40, wherein each phosphodiester block is within the first 8 internucleoside linkages from the 5′-end of the modified oligonucleotide.
   Embodiment 46. The oligomeric compound of any of embodiments 1-40, wherein each phosphodiester block is within the first 6 internucleoside linkages from the 5′-end of the modified oligonucleotide.
   Embodiment 47. The oligomeric compound of any of embodiments 1-40, wherein each phosphodiester block is within the first 4 internucleoside linkages from the 5′-end of the modified oligonucleotide.
   Embodiment 48. The oligomeric compound of any of embodiments 1-40, wherein each phosphodiester block is within the first 2 internucleoside linkages from the 5′-end of the modified oligonucleotide.
   Embodiment 49. The oligomeric compound of any of embodiments 1-25, wherein the modified oligonucleotide has an internucleoside linkage motif (5′ to 3′) selected from: sososssssssssssss, ssosssssssssssoss, ssosssssosssssoss, ssosssosssosssoss, soossssssssssooss, sooosssssssssooss, sooossssssssoooss, sssssssooosssssss, SsoSsssssssssssss, ssssosssssssssSss, ssssssosssssssSss, ssssssssosssssSss, ssssssssssosssSss, ssssssssssssosss, ssssssssssssssoss, sossssssssssssoss, sosssssssssosssss, sosssssssosssssss, sosssssosssssssss, sosssosssssssssss, ssssosssssssssoss, ssssssosssssssoss, ssssssssosssssoss, ssssssssssosssoss, ssssssssssssososs, soossssssssssssss, sSsoossssssssssss, sssssoosssssssSss, sssssssoossssssss, sSsssssssoossssss, sSsssssssssoossss, sssssssssssssooss, sssssssoooossssss, Ssoooosssssssssss, ssssoooosssssssss, ssssssssoooossSss, ssssssssssooooSss, sssssssssssooooss, ssssssooooossssss, ssssssoooooosssss, soooosssssssoooss, sssssooooooosssss, ssssssssssssssoss, ssssssssssssosss, sssssssssssssooss, ssssssssssssososs, sssssssssssosssss, sssssssssssososss, ssssssssssossosss, sssssssssosssssss, sssssssssosssosss, ssssssssosssssoss, ssssssssossssosss, sssssssossssssSss, sssssssoossssssss, sssssossssssssSss, sSsosssssssssssss, sosssssssssssssss, sossssssosssssssS, soossssssssssssss, ossssssssssssssssso, sssssssssssssssssoo, ssssssssssssssssoss, sssssssssssssssooss, ssssssssssssssoSoss, sssssssssosssssssss, sssssssssosssssSoss, ssssssssoosssssssss, sosssssssssssssssss, sosssssssssssssSoss, sosssssssosssssssss, sososssssssssssssss, soossssssssssssssss, sssssssssssssssssss, ssssssssssssssssso, ossssssssssssssssss, ssssssssssssososso, sssssssssssssssoss, sssssssssssssososs, ssssssssosssssssss, ssssssssossssssoss, sossssssssssssssss, sosssssssssssssoss, sossssssosssssssss, sosossssssssssssss, ssssssssssooooss, ssssssSSoooossss, sssssssooossssss, ssssssoooossssss, ssssssooooosssss, sssssoooooosssss, sssssooooooossss, ssssoooossssssss, ssossssssssssoss, ssosssssossssoss, ssosssosssossoss, ssossossossososs, ssososososososss, ssoooossssssssss, soosssssssssooss, sooossssssssooss, sooosssssssoooss, soooossssssoooss, sssssssssooooss, ssssssssoooosss, ssssssooossssss, ssssssoooosssss, sssssooooosssss, sssssoooooossss, ssssoooosssssss, ssssooooooossss, sssosssosssosss, ssosssssssssoss, ssossossossosss, ssossossosososs, ssososososososs, ssoooosssssssss, soossssssssooss, sooosssssssooss, sooossssssoooss, and soooosssssoooss; wherein, ‘s’ represents a phosphorothioate internucleoside linkage and ‘o’ represents a phosphodiester internucleoside linkage.
   Embodiment 50. The oligomeric compound of embodiment 1, wherein the modified oligonucleotide has a sugar motif (5′ to 3′) selected from eeeeeeeeeeeeeeeeee or nnnnnnnnnnnnnnnnnn and an internucleoside linkage motif selected from sososssssssssssss, soossssssssssssss, sosssosssssssssss, sosssssosssssssss, sosssssssosssssss, sssoossssssssssss, sssssssoossssssss, sssssssssoossssss, and sssssssssssoossss.
   Embodiment 51. The oligomeric compound of embodiment 1, wherein the modified oligonucleotide has a sugar motif (5′ to 3′) selected from eeeeeeeeeeeeeeeeeeee and ennnnnnnnnnnnnnnnnne, and an internucleoside linkage motif of ossssssssssssssssso.
   Embodiment 52. The oligomeric compound of any of embodiments 1-51, wherein the modified oligonucleotide consists of 16 linked nucleosides.
   Embodiment 53. The oligomeric compound of any of embodiments 1-51, wherein the modified oligonucleotide consists of 17 linked nucleosides.
   Embodiment 54. The oligomeric compound of any of embodiments 1-51, wherein the modified oligonucleotide consists of 18 linked nucleosides.
   Embodiment 55. The oligomeric compound of any of embodiments 1-51, wherein the modified oligonucleotide consists of 19 linked nucleosides.
   Embodiment 56. The oligomeric compound of any of embodiments 1-51, wherein the modified oligonucleotide consists of 20 linked nucleosides.
   Embodiment 57. The oligomeric compound of any of embodiments 1-56 comprising a conjugate group.
   Embodiment 58. The oligomeric compound of embodiment 57, wherein a conjugate group is attached to the modified oligonucleotide at the 5′-end of the modified oligonucleotide.
   Embodiment 59. The oligomeric compound of embodiment 57 or embodiment 58, wherein the conjugate group is attached to the modified oligonucleotide at the 3′-end of the modified oligonucleotide.
   Embodiment 60. The oligomeric compound of any of embodiments 57-59, wherein the conjugate group comprises a lipid or lipophilic group, a carbohydrate, an antibody, a peptide, or a protein.
   Embodiment 61. The oligomeric compound of any of embodiments 1-60, wherein the nucleobase sequence of the modified oligonucleotide is complementary to a pre-mRNA.
   Embodiment 62. The oligomeric compound of embodiment 61, wherein the nucleobase sequence of the modified oligonucleotide is complementary to a splice modulation site of a pre-mRNA.
   Embodiment 63. The oligomeric compound of embodiment 61 or embodiment 62, wherein the modified oligonucleotide is 80% complementary to the pre-mRNA.
   Embodiment 64. The oligomeric compound of embodiment 61 or embodiment 62, wherein the modified oligonucleotide is 90% complementary to the pre-mRNA.
   Embodiment 65. The oligomeric compound of embodiment 61 or embodiment 62, wherein the modified oligonucleotide is 95% complementary to the pre-mRNA.
   Embodiment 66. The oligomeric compound of embodiment 61 or embodiment 62, wherein the modified oligonucleotide is 100% complementary to the pre-mRNA.
   Embodiment 67. The oligomeric compound of any of embodiments 61-66, wherein the pre-mRNA is expressed in the CNS.
   Embodiment 68. The oligomeric compound of any of embodiments 61-67, wherein the pre-mRNA is expressed in muscle.
   Embodiment 69. The oligomeric compound of any of embodiments 61-68, wherein the pre-mRNA is selected from SMN2, SCN1A, DMD, APP, ATXN3, SmgGDS, PK-M, PK-M1, PK-M2, MAPT, LRP8, CLN3, IKBKAP, USH1C, LMNA, dysferlin, TGFBR1, C5, PKD1, ATXN1, ATXN7, CACNA1A, HTT, ATN1, TBP, or IL-1RAP.
   Embodiment 70. The oligomeric compound of any of embodiments 61-68, wherein the pre-mRNA is other than SMN2, DMD, or SCN1A.
   Embodiment 71. The oligomeric compound of any of embodiments 1-70, wherein the modified oligonucleotide has an internucleoside linkage motif (5′ to 3′) other than: soooosssssssoooo, sooossssssssooos, sooosssssssssoos, sooosssssssssssooos, soosssssssssooss, and sssssssssssoos; wherein, ‘s’ represents a phosphorothioate internucleoside linkage and ‘o’ represents a phosphodiester internucleoside linkage.
   Embodiment 72. An oligomeric compound comprising a modified oligonucleotide consisting of 16-20 linked nucleosides, wherein:
[0067] each nucleoside of the modified oligonucleotide is either a sugar-modified nucleoside or a DNA nucleoside, provided that not more than 4 nucleosides are DNA nucleosides; and
[0068] each internucleoside linkage is either a phosphorothioate internucleoside linkage or a phosphodiester internucleoside linkage.
   Embodiment 73. The oligomeric compound of embodiment 72, wherein the modified oligonucleotide comprises 1, 2, 3, 4, 5, 6, 7, 8, 9, 10, 11, 12, 13, 14, 15, 16, 17, 18, 19, or 20 sugar-modified nucleosides.
   Embodiment 74. The oligomeric compound of embodiment 72 or embodiment 73, wherein the modified oligonucleotide has an internucleoside linkage motif (5′ to 3′) selected from: sososssssssssssss, ssosssssssssssoss, ssosssssosssssoss, ssosssosssosssoss, soossssssssssooss, sooosssssssssooss, sooossssssssoooss, sssssssooosssssss, SsoSsssssssssssss, ssssosssssssssSss, ssssssossssssssss, sssssssSossssssss, sssssssssSossssss, ssssssssssssosss, ssssssssssssssoss, sossssssssssssoss, sosSsssssssosssss, sosssssssosssssss, sosSsssosssssssss, sosSsosssssssssss, ssssosssssssssoss, ssssssosssssssoss, ssssssssosssssoss, ssssssssssosssoss, sssssssssssSososs, soossssssssssssss, sSsoossssssssssss, sssssoossssssssss, sssssssoossssssss, sssssssssoossssss, sssssssssssoossss, sssssssssssssooss, sssssssoooossssss, Ssoooosssssssssss, ssssoooosssssssss, ssssssssoooosssss, ssssssssssoooosss, sssssssssssooooss, ssssssooooossssss, ssssssoooooosssss, soooosssssssoooss, sssssooooooosssss, ssssssssssssssoss, ssssssssssssosss, sssssssssssssooss, ssssssssssssososs, sssssssssssosssss, sssssssssssososss, ssssssssssossosss, sssssssssoSssssss, sssssssssosssosss, ssssssssosssssoss, ssssssssossssosss, sssssssoSssssssss, sssssssoossssssss, sssssoSssssssssss, sSsosssssssssssss, sosssssssssssssss, sossssssossssssss, soossssssssssssss, ossssssssssssssssso, sssssssssssssssssoo, ssssssssssssssssoss, sssssssssssssssooss, ssssssssssssssososs, sssssssssosssssssss, sssssssssossssssoss, ssssssssoosssssssss, sosssssssssssssssss, sossssssssssssssoss, sosssssssosssssssss, sososssssssssssssss, soossssssssssssssss, sssssssssssssssssss, ssssssssssssssssso, ossssssssssssssssss, ssssssssssssososso, sssssssssssssssoss, sssssssssssssososs, ssssssssosssssssss, ssssssssossssssoss, sossssssssssssssss, sosssssssssssssoss, sossssssosssssssss, sosossssssssssssss, ssssssssssooooss, ssssssssoooossss, sssssssooossssss, ssssssoooossssss, ssssssooooosssss, sssssoooooosssss, sssssooooooossss, ssssoooossssssss, ssossssssssssoss, ssosssssossssoss, ssosssosssossoss, ssossossossososs, ssososososososss, ssoooossssssssss, soosssssssssooss, sooossssssssooss, sooosssssssoooss, soooossssssoooss, sssssssssooooss, ssssssssoooosss, ssssssooossssss, ssssssoooosssss, sssssooooosssss, sssssoooooossss, ssssoooosssssss, ssssooooooossss, sssosssosssosss, ssosssssssssoss, ssossossossosss, ssossossosososs, ssososososososs, ssoooosssssssss, soossssssssooss, sooosssssssooss, sooossssssoooss, and soooosssssoooss; wherein, ‘s’ represents a phosphorothioate internucleoside linkage and ‘o’ represents a phosphodiester internucleoside linkage.
   Embodiment 75. The oligomeric compound of embodiment 74 having a sugar motif (5′ to 3′) selected from: eeeeeeeeeeeeeeeeeeee, eeeeeeeeeeeeeeeeeee, eeeeeeeeeeeeeeeeee, eeeeeeeeeeeeeeeee, eeeeeeeeeeeeeeee, nnnnnnnnnennnnnnn, nnnnnnnnnnnnnnnnn, n ennnn nnnnnennnnnn, nnnnnnnnnnnnnnnnnnn, nnnnnnnnnnnnnnnnnnnn, nennnnneneennnnnnn, nnnnnnnnnnnnenneen, nennnnneneenenneen, nnnnnnnnnnnnnnnnnne, nnnnnnnnnnnnnnnnnnd, nnnnnnnnnnnnnnnnnny, nnnnnnnnnnnnnnnnnndd, nnnnnnnnnnnnnnnnnned, nnnnnnnnnnnnnnnnnnde, nnnnnnnnnnnnnnnnnnee, eeeeeeeeeeeeeeeeeedd, eeeeeeeeeeeeeeeeeeed, eeeeeeeeeeeeeeeeeede, nnnnnnnnnnnnn nnnnd, nnnnnnnnnnnnnnnne, eeeeeeeeeeeeeeeeeed, keekeekeekeekeeeek, keeekeeekeeekeeeek, keeeeekeeeeekeeeek, keeeeeeekeeeeeeeek, keeeeeeeeeeeeeeeek, eeekeekeekeekeekek, eeekeekeekeekeekee, eeeeeekeekeekeekee, eeeeeekeekeekeeeee, eeeeeekeeeeekeeeee, keekeekeekeeeeeeee, eeeeeeeekeekeekeek, keekeekeeeeeeeeeee, eeeeeeeeeeekeekeek, keekeeeeeeeeeeeeee, eeeeeeeeeeeeeekeek, keekeekeekeekeeek, keeekeeekeeekeeek, keeeekeeeeekeeeek, keeeeeeekeeeeeeek, keeeeeeeeeeeeeeek, eekeekeekeekeekek, eekeekeekeekeekee, eeeeekeekeekeekee, eeeeekeekeekeeeee, eeeeekeeeeekeeeee, keekeekeekeeeeeee, eeeeeeekeekeekeek, keekeekeeeeeeeeee, eeeeeeeeeekeekeek, keekeeeeeeeeeeeee, eeeeeeeeeeeeekeek, keekeekeekeekeek, keeekeeekeeekeek, keeeekeeeekeeeek, keeeeeeekeeeeeek, keeeeeeeeeeeeeek, kekeekeekeekeeke, eekeekeekeekeeke, eeeeekeekeekeeke, eeeeekeekeekeeee, eeeeekeeeeekeeee, keekeekeekeeeeee, eeeeeekeekeekeek, keekeekeeeeeeeee, eeeeeeeeekeekeek, keekeeeeeeeeeeee, eeeeeeeeeeeekeek, eeeeeeeeeeeeeeeeeed, eeeeeeeeeeeeeeeeeey, ennnnnnnnnnnnnnnnnn, and ennnnnnnnnnnnnnnnnne; wherein ‘e’ represents a 2′-MOE sugar moiety, ‘n’ represents a 2′-NMA sugar moiety, ‘k’ represents a cEt sugar moiety, ‘d’ represents a 2′-β-D-deoxyribosyl sugar moiety, and ‘y’ represents a 2′-OMe sugar moiety.
   Embodiment 76. The oligomeric compound of embodiment 73 or embodiment 74, wherein the modified oligonucleotide has a sugar motif (5′ to 3′) selected from eeeeeeeeeeeeeeeeee or nnnnnnnnnnnnnnnnnn and an internucleoside linkage motif selected from sososssssssssssss, soossssssssssssss, sosssosssssssssss, sosssssosssssssss, sosssssssosssssss, sssoossssssssssss, sssssssoossssssss, sssssssssoossssss, and sssssssssssoossss.
   Embodiment 77. The oligomeric compound of embodiment 73 or embodiment 74, wherein the modified oligonucleotide has a sugar motif (5′ to 3′) selected from eeeeeeeeeeeeeeeeeeee and ennnnnnnnnnnnnnnnnne, and an internucleoside linkage motif of ossssssssssssssssso.
   Embodiment 78. The oligomeric compound of any of embodiments 72-77 comprising a conjugate group.
   Embodiment 79. The oligomeric compound of embodiment 78, wherein a conjugate group is attached to the modified oligonucleotide at the 5′-end of the modified oligonucleotide.
   Embodiment 80. The oligomeric compound of embodiment 78 or embodiment 79, wherein the conjugate group is attached to the modified oligonucleotide at the 3′-end of the modified oligonucleotide.
   Embodiment 81. The oligomeric compound of any of embodiments 78-80, wherein the conjugate group comprises a lipid or lipophilic group, a carbohydrate, an antibody, a peptide, or a protein.
   Embodiment 82. The oligomeric compound of any of embodiments 73-81, wherein the nucleobase sequence of the modified oligonucleotide is complementary to a pre-mRNA.
   Embodiment 83. The oligomeric compound of embodiment 82, wherein the nucleobase sequence of the modified oligonucleotide is complementary to a splice modulation site of a pre-mRNA.
   Embodiment 84. The oligomeric compound of embodiment 82 or embodiment 83, wherein the modified oligonucleotide is 80%, 90%, 95%, or 100% complementary to the pre-mRNA.
   Embodiment 85. The oligomeric compound of any of embodiments 82-84, wherein the pre-mRNA is expressed in the CNS.
   Embodiment 86. The oligomeric compound of any of embodiments 82-84, wherein the pre-mRNA is expressed in muscle.
   Embodiment 87. The oligomeric compound of any of embodiments 82-84, wherein the pre-mRNA is selected from SMN2, SCN1A, DMD, APP, ATXN3, SmgGDS, PK-M, PK-M1, PK-M2, MAPT, LRP8, CLN3, IKBKAP, USH1C, LMNA, dysferlin, TGFBR1, C5, PKD1, ATXN1, ATXN7, CACNA1A, HTT, ATN1, TBP, or IL-1RAP.
   Embodiment 88. The oligomeric compound of any of embodiments 82-84, wherein the pre-mRNA is other than SMN2, DMD, or SCN1A.
   Embodiment 89. The oligomeric compound of any of embodiments 72-88, having an internucleoside linkage motif (5′ to 3′) other than: soooosssssssoooo, sooossssssssooos, sooosssssssssoos, sooosssssssssssooos, soosssssssssooss, and sssssssssssoos; wherein, ‘s’ represents a phosphorothioate internucleoside linkage and ‘o’ represents a phosphodiester internucleoside linkage.
   Embodiment 90. A pharmaceutical composition comprising an oligomeric compound of any of embodiments 1-89 and a pharmaceutically acceptable diluent.
   Embodiment 91. The pharmaceutical composition of embodiment 90, wherein the pharmaceutically acceptable diluent is selected from water, saline, PBS, and artificial CSF.
   Embodiment 92. A method comprising contacting a cell with the oligomeric compound of any of embodiments 1-89.
   Embodiment 93. A method of modulating splicing of a pre-mRNA in a cell comprising contacting the cell with an oligomeric compound of any of embodiments 1-89 and thereby modulating splicing of the pre-mRNA in the cell.
   Embodiment 94. The method of embodiment 93, wherein the modulating of the pre-mRNA is inducing exon skipping in the pre-mRNA.
   Embodiment 95. The method of embodiment 93, wherein the modulating of the pre-mRNA is inducing intron retention.
   Embodiment 96. The method of embodiment 93, wherein the modulating of the pre-mRNA results on alternative splicing.
   Embodiment 97. The method of any embodiments 92-96, wherein the resulting mRNA is a substrate for nonsense mediated decay.
   Embodiment 98. The method of any of embodiments 92-97, wherein in the cell is in an animal.
   Embodiment 99. A method comprising administering to an animal the pharmaceutical composition of embodiment 90 or embodiment 91.
   Embodiment 100. The method of embodiment 99, wherein the animal has a disease or disorder associated with altered splicing of a pre-mRNA.
   Embodiment 101. A method of treating a disease or condition in an animal comprising administering to an animal the pharmaceutical composition of embodiment 90 or embodiment 91 and thereby treating the disease or condition in the animal.
   Embodiment 102. The method of embodiment 101, wherein the disease or condition is associated with altered splicing of a pre-mRNA.
   Embodiment 103. The method of embodiment 101, wherein the disease or condition is not associated with altered splicing of a pre-mRNA.
   Embodiment 104. The method of any of embodiments 98-103, wherein the animal is a human.
   Embodiment 105. The method of any of embodiments 99-104, wherein the pharmaceutical composition is administered to the CNS.
   Embodiment 106. The method of any of embodiments 99-104, wherein the pharmaceutical composition is administered systemically.
   Embodiment 107. An oligomeric compound of any of embodiments 1-89 for use in modulating splicing.
   Embodiment 108. An oligomeric compound of any of embodiments 1-89 for use in therapy.

### Certain Oligonucleotides

[0069] In certain embodiments, provided herein are oligomeric compounds comprising oligonucleotides, which consist of linked nucleosides. Oligonucleotides may be unmodified oligonucleotides (RNA or DNA) or may be modified oligonucleotides. Modified oligonucleotides comprise at least one modification relative to unmodified RNA or DNA. That is, modified oligonucleotides comprise at least one modified nucleoside (comprising a modified sugar moiety and/or a modified nucleobase) and/or at least one modified internucleoside linkage.

### A. Certain Modified Nucleosides

[0070] Modified nucleosides comprise a modified sugar moiety or a modified nucleobase or both a modified sugar moiety and a modified nucleobase.

### 1. Certain Sugar Moieties

[0071] In certain embodiments, modified sugar moieties are non-bicyclic modified sugar moieties. In certain embodiments, modified sugar moieties are bicyclic or tricyclic sugar moieties. In certain embodiments, modified sugar moieties are sugar surrogates. Such sugar surrogates may comprise one or more substitutions corresponding to those of other types of modified sugar moieties.

[0072] In certain embodiments, modified sugar moieties are non-bicyclic modified sugar moieties comprising a furanosyl ring with one or more substituent groups none of which bridges two atoms of the furanosyl ring to form a bicyclic structure. Such non bridging substituents may be at any position of the furanosyl, including but not limited to substituents at the 2′, 4′, and/or 5′ positions. In certain embodiments one or more non-bridging substituent of non-bicyclic modified sugar moieties is branched. Examples of 2′-substituent groups suitable for non-bicyclic modified sugar moieties include but are not limited to: 2′-F, 2′-OCH₃ (“OMe” or “O-methyl”), and 2′-O(CH₂)₂OCH₃ (“MOE” or “O-methoxyethyl”), and 2′-O—N-alkyl acetamide, e.g., 2′-O—N-methyl acetamide (“NMA”), 2′-O—N-dimethyl acetamide, 2′-O—N-ethyl acetamide, or 2′-O—N-propyl acetamide. For example, see U.S. Pat. No. 6,147,200, Prakash et al., 2003, Org. Lett., 5, 403-6. A “2′-O—N-methyl acetamide nucleoside” or “2′-NMA nucleoside” is shown below:

[chemical structure]

[0073] In certain embodiments, 2′-substituent groups are selected from among: halo, allyl, amino, azido, SH, CN, OCN, CF₃, OCF₃, 0-C₁-C₁₀ alkoxy, 0-C₁-C₁₀ substituted alkoxy, 0-C₁-C₁₀ alkyl, 0-C₁-C₁₀ substituted alkyl, S-alkyl, N(Rₘ)-alkyl, O-alkenyl, S-alkenyl, N(Rₘ)-alkenyl, O-alkynyl, S-alkynyl, N(Rₘ)-alkynyl, O-alkylenyl-O-alkyl, alkynyl, alkaryl, aralkyl, O-alkaryl, O-aralkyl, O(CH₂)₂SCH₃, O(CH₂)₂ON(Rₘ)(Rₙ) or OCH₂C(═O)—N(Rₘ)(Rₙ), where each Rₘ and Rₙ is, independently, H, an amino protecting group, or substituted or unsubstituted C₁-C₁₀ alkyl, and the 2′-substituent groups described in Cook et al., U.S. Pat. No. 6,531,584; Cook et al., U.S. Pat. No. 5,859,221; and Cook et al., U.S. Pat. No. 6,005,087. Certain embodiments of these 2′-substituent groups can be further substituted with one or more substituent groups independently selected from among: hydroxyl, amino, alkoxy, carboxy, benzyl, phenyl, nitro (NO₂), thiol, thioalkoxy, thioalkyl, halogen, alkyl, aryl, alkenyl and alkynyl. Examples of 4′-substituent groups suitable for non-bicyclic modified sugar moieties include but are not limited to alkoxy (e.g., methoxy), alkyl, and those described in Manoharan et al., WO 2015/106128. Examples of 5′-substituent groups suitable for non-bicyclic modified sugar moieties include but are not limited to: 5′-methyl (R or S), 5′-vinyl, and 5′-methoxy. In certain embodiments, non-bicyclic modified sugar moieties comprise more than one non-bridging sugar substituent, for example, 2′-F-5′-methyl sugar moieties and the modified sugar moieties and modified nucleosides described in Migawa et al., WO 2008/101157 and Rajeev et al., US2013/0203836.

[0074] In certain embodiments, a 2′-substituted non-bicyclic modified nucleoside comprises a sugar moiety comprising a non-bridging 2′-substituent group selected from: F, NH₂, N₃, OCF₃, OCH₃, O(CH₂)₃NH₂, CH₂CH═CH₂, OCH₂CH═CH₂, OCH₂CH₂OCH₃, O(CH₂)₂SCH₃, O(CH₂)₂ON(Rₘ)(Rₙ), O(CH₂), ON(CH₃)₂, O(CH₂)₂O(CH₂)₂N(CH₃)₂, and N-substituted acetamide (OCH₂C(═O)—N(Rₘ)(Rₙ)), where each Rₘ and Rₙ is, independently, H, an amino protecting group, or substituted or unsubstituted C₁-C₁₀ alkyl, e.g., for example, OCH₂C(═O)—N(H)CH₃ (“NMA”).

[0075] In certain embodiments, a 2′-substituted non-bicyclic modified nucleoside comprises a sugar moiety comprising a non-bridging 2′-substituent group selected from: F, OCF₃, OCH₃, OCH₂CH₂OCH₃, O(CH₂)₂SCH₃, O(CH₂)₂ON(CH₃)₂, O(CH₂)₂O(CH₂)₂N(CH₃)₂, and OCH₂C(═O)—N(H)CH₃ (“NMA”).

[0076] In certain embodiments, a 2′-substituted non-bicyclic modified nucleoside comprises a sugar moiety comprising a non-bridging 2′-substituent group selected from: F, OCH₃, OCH₂CH₂OCH₃, and OCH₂C(═O)—N(H)CH3.

[0077] Certain modified sugar moieties comprise a substituent that bridges two atoms of the furanosyl ring to form a second ring, resulting in a bicyclic sugar moiety. In certain such embodiments, the bicyclic sugar moiety comprises a bridge between the 4′ and the 2′ furanose ring atoms. Examples of such 4′ to 2′ bridging sugar substituents include but are not limited to: 4′-CH₂-2′, 4′-(CH₂)₂-2′, 4′-(CH₂)₃-2′, 4′-CH₂—O-2′ (“LNA”), 4′-CH₂—S-2′, 4′-(CH₂)₂—O-2′ (“ENA”), 4′-CH(CH₃)—O-2′ (referred to as “constrained ethyl” or “cEt”), 4′-CH₂—O—CH₂-2′, 4′-CH₂—N(R)-2′, 4′-CH(CH₂OCH₃)—O-2′ (“constrained MOE” or “cMOE”) and analogs thereof (see, e.g., Seth et al., U.S. Pat. No. 7,399,845, Bhat et al., U.S. Pat. No. 7,569,686, Swayze et al., U.S. Pat. No. 7,741,457, and Swayze et al., U.S. Pat. No. 8,022,193), 4′-C(CH₃)(CH₃)—O-2′ and analogs thereof (see, e.g., Seth et al., U.S. Pat. No. 8,278,283), 4′-CH₂—N(OCH₃)-2′ and analogs thereof (see, e.g., Prakash et al., U.S. Pat. No. 8,278,425), 4′-CH₂—O—N(CH₃)-2′ (see, e.g., Allerson et al., U.S. Pat. No. 7,696,345 and Allerson et al., U.S. Pat. No. 8,124,745), 4′-CH₂—C(H)(CH₃)-2′ (see, e.g., Zhou, et al., J. Org. Chem., 2009, 74, 118-134), 4′-CH₂—C(═CH₂)-2′ and analogs thereof (see e.g., Seth et al., U.S. Pat. No. 8,278,426), 4′-C(RₐR_{b})—N(R)—O-2′, 4′-C(RₐR_{b})—O—N(R)-2′, 4′-CH₂—O—N(R)-2′, and 4′-CH₂—N(R)—O- 2′, wherein each R, Rₐ, and R_{b} is, independently, H, a protecting group, or C₁-C₁₂ alkyl (see, e.g. Imanishi et al., U.S. Pat. No. 7,427,672).

[0078] In certain embodiments, such 4′ to 2′ bridges independently comprise from 1 to 4 linked groups independently selected from: —[C(Rₐ)(R_{b})]ₙ—, —[C(Rₐ)(R_{b})]ₙ—O—, —C(Rₐ)═C(R_{b})—, —C(Rₐ)═N—, —C(═NRₐ)—, —C(═O)—, —C(═S)—, —O—, —Si(Rₐ)₂—, —S(═O)—, and —N(Rₐ)—;
[0079] wherein:
[0080] x is 0, 1, or 2;
[0081] n is 1, 2, 3, or 4;
[0082] each Rₐ and R_{b} is, independently, H, a protecting group, hydroxyl, C₁-C₁₂ alkyl, substituted C₁-C₁₂ alkyl, C₂-C₁₂ alkenyl, substituted C₂-C₁₂ alkenyl, C₂-C₁₂ alkynyl, substituted C₂-C₁₂ alkynyl, C₅-C₂₀ aryl, substituted C₅-C₂₀ aryl, heterocycle radical, substituted heterocycle radical, heteroaryl, substituted heteroaryl, C₅-C₇ alicyclic radical, substituted C₅-C₇ alicyclic radical, halogen, OJ₁, NJ₁J₂, SJ₁, N₃, COOJ₁, acyl (C(═O)—H), substituted acyl, CN, sulfonyl (S(═O)₂-J₁), or sulfoxyl (S(═O)-J₁); and
[0083] each J₁ and J₂ is, independently, H, C₁-C₁₂ alkyl, substituted C₁-C₁₂ alkyl, C₂-C₁₂ alkenyl, substituted C₂-C₁₂ alkenyl, C₂-C₁₂ alkynyl, substituted C₂-C₁₂ alkynyl, C₅-C₂₀ aryl, substituted C₅-C₂₀ aryl, acyl (C(═O)—H), substituted acyl, a heterocycle radical, a substituted heterocycle radical, C₁-C₁₂ aminoalkyl, substituted C₁-C₁₂ aminoalkyl, or a protecting group.

[0084] Additional bicyclic sugar moieties are known in the art, see, for example: Freier et al., Nucleic Acids Research, 1997, 25(22), 4429-4443, Albaek et al., J Org. Chem., 2006, 71, 7731-7740, Singh et al., Chem. Commun., 1998, 4, 455-456; Koshkin et al., Tetrahedron, 1998, 54, 3607-3630; Kumar et al., Bioorg. Med. Chem. Lett., 1998, 8, 2219-2222; Singh et al., J. Org. Chem., 1998, 63, 10035-10039; Srivastava et al., J Am. Chem. Soc., 2007, 129, 8362-8379; Wengel et a., U.S. Pat. No. 7,053,207; Imanishi et al., U.S. Pat. No. 6,268,490; Imanishi et al. U.S. Pat. No. 6,770,748; Imanishi et al., U.S. RE44,779; Wengel et al., U.S. Pat. No. 6,794,499; Wengel et al., U.S. Pat. No. 6,670,461; Wengel et al., U.S. Pat. No. 7,034,133; Wengel et al., U.S. Pat. No. 8,080,644; Wengel et al., U.S. Pat. No. 8,034,909; Wengel et al., U.S. Pat. No. 8,153,365; Wengel et al., U.S. Pat. No. 7,572,582; and Ramasamy et al., U.S. Pat. No. 6,525,191; Torsten et al., WO 2004/106356; Wengel et al., WO 1999/014226; Seth et al., WO 2007/134181; Seth et al., U.S. Pat. No. 7,547,684; Seth et al., U.S. Pat. No. 7,666,854; Seth et al., U.S. Pat. No. 8,088,746; Seth et al., U.S. Pat. No. 7,750,131; Seth et al., U.S. Pat. No. 8,030,467; Seth et al., U.S. Pat. No. 8,268,980; Seth et al., U.S. Pat. No. 8,546,556; Seth et al., U.S. Pat. No. 8,530,640; Migawa et al., U.S. Pat. No. 9,012,421; Seth et al., U.S. Pat. No. 8,501,805; and U.S. Patent Publication Nos. Allerson et al., US2008/0039618 and Migawa et al., US2015/0191727.

[0085] In certain embodiments, bicyclic sugar moieties and nucleosides incorporating such bicyclic sugar moieties are further defined by isomeric configuration. For example, an LNA nucleoside (described herein) may be in the α-L configuration or in the 3-D configuration.

[chemical structure]

α-L-methyleneoxy (4′-CH₂—O-2′) or α-L-LNA bicyclic nucleosides have been incorporated into oligonucleotides that showed antisense activity (Frieden et al., Nucleic Acids Research, 2003, 21, 6365-6372). Herein, general descriptions of bicyclic nucleosides include both isomeric configurations. When the positions of specific bicyclic nucleosides (e.g., LNA or cEt) are identified in exemplified embodiments herein, they are in the β-D configuration, unless otherwise specified.

[0086] In certain embodiments, modified sugar moieties comprise one or more non-bridging sugar substituent and one or more bridging sugar substituent (e.g., 5′-substituted and 4′-2′ bridged sugars).

[0087] In certain embodiments, modified sugar moieties are sugar surrogates. In certain such embodiments, the oxygen atom of the sugar moiety is replaced, e.g., with a sulfur, carbon or nitrogen atom. In certain such embodiments, such modified sugar moieties also comprise bridging and/or non-bridging substituents as described herein. For example, certain sugar surrogates comprise a 4′-sulfur atom and a substitution at the 2′-position (see, e.g., Bhat et al., U.S. Pat. No. 7,875,733 and Bhat et al., U.S. Pat. No. 7,939,677) and/or the 5′ position.

[0088] In certain embodiments, sugar surrogates comprise rings having other than 5 atoms. For example, in certain embodiments, a sugar surrogate comprises a six-membered tetrahydropyran (“THP”). Such tetrahydropyrans may be further modified or substituted. Nucleosides comprising such modified tetrahydropyrans include but are not limited to hexitol nucleic acid (“HNA”), anitol nucleic acid (“ANA”), manitol nucleic acid (“NINA”) (see, e.g., Leumann, CJ. Bioorg. & Med. Chem. 2002, 10, 841-854), fluoro HNA:

[chemical structure]

(“F-HNA”, see e.g. Swayze et al., U.S. Pat. No. 8,088,904; Swayze et al., U.S. Pat. No. 8,440,803; Swayze et al., U.S. Pat. No. 8,796,437; and Swayze et al., U.S. Pat. No. 9,005,906; F-HNA can also be referred to as a F-THP or 3′-fluoro tetrahydropyran), and nucleosides comprising additional modified THP compounds having the formula:

[chemical structure]

wherein, independently, for each of said modified THP nucleoside:
[0089] Bx is a nucleobase moiety;
[0090] T₃ and T₄ are each, independently, an internucleoside linking group linking the modified THP nucleoside to the remainder of an oligonucleotide or one of T₃ and T₄ is an internucleoside linking group linking the modified THP nucleoside to the remainder of an oligonucleotide and the other of T₃ and T₄ is H, a hydroxyl protecting group, a linked conjugate group, or a 5′ or 3′-terminal group;
   q₁, q₂, q₃, q₄, q₅, q₆ and g₇ are each, independently, H, C₁-C₆ alkyl, substituted C₁-C₆ alkyl, C₂-C₆ alkenyl, substituted C₂-C₆ alkenyl, C₂-C₆ alkynyl, or substituted C₂-C₆ alkynyl; and each of R₁ and R₂ is independently selected from among: hydrogen, halogen, substituted or unsubstituted alkoxy, NJ₁J₂, SJ₁, N₃, OC(═X)J₁, OC(═X)NJ₁J₂, NJ₃C(═X)NJ₁J₂, and CN, wherein X is O, S or NJ₁, and each J₁, J₂, and J₃ is, independently, H or C₁-C₆ alkyl.

[0091] In certain embodiments, modified THP nucleosides are provided wherein q₁, q₂, q₃, q₄, q₅, q₆ and q₇ are each H.

[0092] In certain embodiments, at least one of q₁, q₂, q₃, q₄, q₅, q₆ and q₇ is other than H. In certain embodiments, at least one of q₁, q₂, q₃, q₄, q₅, q₆ and q₇ is methyl. In certain embodiments, modified THP nucleosides are provided wherein one of R₁ and R₂ is F. In certain embodiments, R₁ is F and R₂ is H, in certain embodiments, R₁ is methoxy and R₂ is H, and in certain embodiments, R₁ is methoxyethoxy and R₂ is H.

[0093] In certain embodiments, sugar surrogates comprise rings having more than 5 atoms and more than one heteroatom. For example, nucleosides comprising morpholino sugar moieties and their use in oligonucleotides have been reported (see, e.g., Braasch et al., Biochemistry, 2002, 41, 4503-4510 and Summerton et al., U.S. Pat. No. 5,698,685; Summerton et al., U.S. Pat. No. 5,166,315; Summerton et al., U.S. Pat. No. 5,185,444; and Summerton et al., U.S. Pat. No. 5,034,506). As used here, the term “morpholino” means a sugar surrogate having the following structure:

[chemical structure]

In certain embodiments, morpholinos may be modified, for example by adding or altering various substituent groups from the above morpholino structure. Such sugar surrogates are referred to herein as “modified morpholinos.”

[0094] In certain embodiments, sugar surrogates comprise acyclic moieties. Examples of nucleosides and oligonucleotides comprising such acyclic sugar surrogates include but are not limited to: peptide nucleic acid (“PNA”), acyclic butyl nucleic acid (see, e.g., Kumar et al., Org. Biomol. Chem., 2013, 11, 5853-5865), and nucleosides and oligonucleotides described in Manoharan et al., WO2011/133876.

[0095] Many other bicyclic and tricyclic sugar and sugar surrogate ring systems are known in the art that can be used in modified nucleosides.

### 2. Certain Modified Nucleobases

[0096] In certain embodiments, modified oligonucleotides comprise one or more nucleosides comprising an unmodified nucleobase. In certain embodiments, modified oligonucleotides comprise one or more nucleosides comprising a modified nucleobase. In certain embodiments, modified oligonucleotides comprise one or more nucleosides that does not comprise a nucleobase, referred to as an abasic nucleoside.

[0097] In certain embodiments, modified nucleobases are selected from: 5-substituted pyrimidines, 6-azapyrimidines, alkyl or alkynyl substituted pyrimidines, alkyl substituted purines, and N-2, N-6 and 0-6 substituted purines. In certain embodiments, modified nucleobases are selected from: 2-aminopropyladenine, 5-hydroxymethyl cytosine, xanthine, hypoxanthine, 2-aminoadenine, 6-N-methylguanine, 6-N-methyladenine, 2-propyl adenine, 2-thiouracil, 2-thiothymine and 2-thiocytosine, 5-propynyl (—C═C—CH₃) uracil, 5-propynylcytosine, 6-azouracil, 6-azocytosine, 6-azothymine, 5-ribosyluracil (pseudouracil), 4-thiouracil, 8-halo, 8-amino, 8-thiol, 8-thioalkyl, 8-hydroxyl, 8-aza and other 8-substituted purines, 5-halo, particularly 5-bromo, 5-trifluoromethyl, 5-halouracil, and 5-halocytosine, 7-methylguanine, 7-methyladenine, 2-F-adenine, 2-aminoadenine, 7-deazaguanine, 7-deazaadenine, 3-deazaguanine, 3-deazaadenine, 6-N-benzoyladenine, 2-N-isobutyrylguanine, 4-N-benzoylcytosine, 4-N-benzoyluracil, 5-methyl 4-N-benzoylcytosine, 5-methyl 4-N-benzoyluracil, universal bases, hydrophobic bases, promiscuous bases, size-expanded bases, and fluorinated bases. Further modified nucleobases include tricyclic pyrimidines, such as 1,3-diazaphenoxazine-2-one, 1,3-diazaphenothiazine-2-one and 9-(2-aminoethoxy)-1,3-diazaphenoxazine-2-one (G-clamp). Modified nucleobases may also include those in which the purine or pyrimidine base is replaced with other heterocycles, for example 7-deaza-adenine, 7-deazaguanosine, 2-aminopyridine and 2-pyridone. Further nucleobases include those disclosed in Merigan et al., U.S. Pat. No. 3,687,808, those disclosed in The Concise Encyclopedia OfPolymer Science And Engineering, Kroschwitz, J.I., Ed., John Wiley & Sons, 1990, 858-859; Englisch et al., Angewandte Chemie, International Edition, 1991, 30, 613; Sanghvi, Y. S., Chapter 15, Antisense Research andApplications, Crooke, S. T. and Lebleu, B., Eds., CRC Press, 1993, 273-288; and those disclosed in Chapters 6 and 15, Antisense Drug Technology, Crooke S. T., Ed., CRC Press, 2008, 163-166 and 442-443.

[0098] Publications that teach the preparation of certain of the above noted modified nucleobases as well as other modified nucleobases include without limitation, Manoharan et al., US2003/0158403; Manoharan et al., US2003/0175906; Dinh et al., U.S. Pat. No. 4,845,205; Spielvogel et al., U.S. Pat. No. 5,130,302; Rogers et al., U.S. Pat. No. 5,134,066; Bischofberger et al., U.S. Pat. No. 5,175,273; Urdea et al., U.S. Pat. No. 5,367,066; Benner et al., U.S. Pat. No. 5,432,272; Matteucci et al., U.S. Pat. No. 5,434,257; Gmeiner et al., U.S. Pat. No. 5,457,187; Cook et al., U.S. Pat. No. 5,459,255; Froehler et al., U.S. Pat. No. 5,484,908; Matteucci et al., U.S. Pat. No. 5,502,177; Hawkins et al., U.S. Pat. No. 5,525,711; Haralambidis et al., U.S. Pat. No. 5,552,540; Cook et al., U.S. Pat. No. 5,587,469; Froehler et al., U.S. Pat. No. 5,594,121; Switzer et al., U.S. Pat. No. 5,596,091; Cook et al., U.S. Pat. No. 5,614,617; Froehler et al., U.S. Pat. No. 5,645,985; Cook et al., U.S. Pat. No. 5,681,941; Cook et al., U.S. Pat. No. 5,811,534; Cook et al., U.S. Pat. No. 5,750,692; Cook et al., U.S. Pat. No. 5,948,903; Cook et al., U.S. Pat. No. 5,587,470; Cook et al., U.S. Pat. No. 5,457,191; Matteucci et al., U.S. Pat. No. 5,763,588; Froehler et al., U.S. Pat. No. 5,830,653; Cook et al., U.S. Pat. No. 5,808,027; Cook et al., 6,166,199; and Matteucci et al., U.S. Pat. No. 6,005,096.

### 3. Certain Modified Internucleoside Linkages

[0099] In certain embodiments, nucleosides of modified oligonucleotides may be linked together using any internucleoside linkage. The two main classes of internucleoside linking groups are defined by the presence or absence of a phosphorus atom. Representative phosphorus-containing internucleoside linkages include but are not limited to phosphodiesters, which contain a phosphodiester bond, P(O₂)═O, (also referred to as unmodified or naturally occurring linkages); phosphotriesters; methylphosphonates; methoxypropylphosphonates (“MOP”); phosphoramidates; mesyl phosphoramidates; phosphorothioates (P(O₂)═S); and phosphorodithioates (HS—P═S). Representative non-phosphorus containing internucleoside linking groups include but are not limited to methylenemethylimino (—CH₂—N(CH₃)—O—CH₂—); thiodiester, thionocarbamate (—O—C(═O)(NH)—S—); siloxane (—O—SiH₂—O—); and N,N′-dimethylhydrazine (—CH₂—N(CH₃)—N(CH₃)—). Modified internucleoside linkages, compared to naturally occurring phosphate linkages, can be used to alter, typically increase, nuclease resistance of the oligonucleotide. In certain embodiments, internucleoside linkages having a chiral atom can be prepared as a racemic mixture, or as separate enantiomers. Methods of preparation of phosphorous-containing and non-phosphorous-containing internucleoside linkages are well known to those skilled in the art.

[0100] Representative internucleoside linkages having a chiral center include but are not limited to alkylphosphonates and phosphorothioates. Modified oligonucleotides comprising internucleoside linkages having a chiral center can be prepared as populations of modified oligonucleotides comprising stereorandom internucleoside linkages, or as populations of modified oligonucleotides comprising phosphorothioate internucleoside linkages in particular stereochemical configurations. In certain embodiments, populations of modified oligonucleotides comprise phosphorothioate internucleoside linkages wherein all of the phosphorothioate internucleoside linkages are stereorandom. Such modified oligonucleotides can be generated using synthetic methods that result in random selection of the stereochemical configuration of each phosphorothioate internucleoside linkage. Nonetheless, as is well understood by those of skill in the art, each individual phosphorothioate of each individual oligonucleotide molecule has a defined stereoconfiguration. In certain embodiments, populations of modified oligonucleotides are enriched for modified oligonucleotides comprising one or more particular phosphorothioate internucleoside linkages in a particular, independently selected stereochemical configuration. In certain embodiments, the particular configuration of the particular phosphorothioate internucleoside linkage is present in at least 65% of the molecules in the population. In certain embodiments, the particular configuration of the particular phosphorothioate internucleoside linkage is present in at least 70% of the molecules in the population. In certain embodiments, the particular configuration of the particular phosphorothioate internucleoside linkage is present in at least 80% of the molecules in the population. In certain embodiments, the particular configuration of the particular phosphorothioate internucleoside linkage is present in at least 90% of the molecules in the population. In certain embodiments, the particular configuration of the particular phosphorothioate internucleoside linkage is present in at least 99% of the molecules in the population. Such chirally enriched populations of modified oligonucleotides can be generated using synthetic methods known in the art, e.g., methods described in Oka et al., JACS, 2003, 125, 8307, Wan et al. Nuc. Acid. Res., 2014, 42, 13456, and WO 2017/015555. In certain embodiments, a population of modified oligonucleotides is enriched for modified oligonucleotides having at least one indicated phosphorothioate in the (Sp) configuration. In certain embodiments, a population of modified oligonucleotides is enriched for modified oligonucleotides having at least one phosphorothioate in the (Rp) configuration. In certain embodiments, modified oligonucleotides comprising (Rp) and/or (Sp) phosphorothioates comprise one or more of the following formulas, respectively, wherein “B” indicates a nucleobase:

[chemical structure]

Unless otherwise indicated, chiral internucleoside linkages of modified oligonucleotides described herein can be stereorandom or in a particular stereochemical configuration.

[0101] In certain embodiments, modified oligonucleotides comprise an internucleoside motif of (5′ to 3′) sooosssssssssssssss. In certain embodiments, the particular stereochemical configuration of the modified oligonucleotides is (5′ to 3′) Sp-o-o-o-Sp-Sp-Sp-Rp-Sp-Sp-Rp-Sp-Sp-Sp-Sp-Sp-Sp-Sp-Sp or Sp-o-o-o-Sp-Sp-Sp-Rp-Sp-Sp-Sp-Sp-Sp-Sp-Sp-Sp-Sp-Sp-Sp; wherein each ‘Sp’ represents a phosphorothioate internucleoside linkage in the S configuration; Rp represents a phosphorothioate internucleoside linkage in the R configuration; and ‘o’ represents a phosphodiester internucleoside linkage.

[0102] Neutral internucleoside linkages include, without limitation, phosphotriesters, methylphosphonates, MMI (3′-CH₂—N(CH₃)—O-5′), amide-3 (3′-CH₂—C(═O)—N(H)-5′), amide-4 (3′-CH₂—N(H)—C(═O)-5′), formacetal (3′-O—CH₂—O-5′), methoxypropyl, and thioformacetal (3′-S—CH₂—O-5′). Further neutral internucleoside linkages include nonionic linkages comprising siloxane (dialkylsiloxane), carboxylate ester, carboxamide, sulfide, sulfonate ester and amides (see e.g., Carbohydrate Modifications in Antisense Research; Y. S. Sanghvi and P. D. Cook, Eds., ACS Symposium Series 580; Chapters 3 and 4, 40-65). Further neutral internucleoside linkages include nonionic linkages comprising mixed N, O, S and CH₂ component parts.

[0103] In certain embodiments, a modified internucleoside linkage is any of those described in WO 2021/030778, incorporated by reference herein.

### B. Certain Motifs

[0104] In certain embodiments, modified oligonucleotides comprise one or more modified nucleosides comprising a modified sugar moiety. In certain embodiments, modified oligonucleotides comprise one or more modified nucleosides comprising a modified nucleobase. In certain embodiments, modified oligonucleotides comprise one or more modified internucleoside linkages. In such embodiments, the modified, unmodified, and differently modified sugar moieties, nucleobases, and/or internucleoside linkages of a modified oligonucleotide define a pattern or motif. In certain embodiments, the patterns of sugar moieties, nucleobases, and internucleoside linkages are each independent of one another. Thus, a modified oligonucleotide may be described by its sugar motif, nucleobase motif and/or internucleoside linkage motif (as used herein, nucleobase motif describes the modifications to the nucleobases independent of the sequence of nucleobases).

### 1. Certain Sugar Motifs

[0105] In certain embodiments, oligonucleotides comprise one or more type of modified sugar and/or unmodified sugar moiety arranged along the oligonucleotide, or portion thereof, in a defined pattern or sugar motif. In certain instances, such sugar motifs include but are not limited to any of the sugar modifications discussed herein.

[0106] Certain modified oligonucleotides have a gapmer motif, which is defined by two external regions or “wings” and a central or internal region or “gap.” The three regions of a gapmer motif (the 5′-wing, the gap, and the 3′-wing) form a contiguous sequence of nucleosides wherein at least some of the sugar moieties of the nucleosides of each of the wings differ from at least some of the sugar moieties of the nucleosides of the gap. Specifically, at least the sugar moieties of the nucleosides of each wing that are closest to the gap (the 3′-most nucleoside of the 5′-wing and the 5′-most nucleoside of the 3′-wing) differ from the sugar moiety of the neighboring gap nucleosides, thus defining the boundary between the wings and the gap (i.e., the wing/gap junction). In certain embodiments, the sugar moieties within the gap are the same as one another. In certain embodiments, the gap includes one or more nucleoside having a sugar moiety that differs from the sugar moiety of one or more other nucleosides of the gap. In certain embodiments, the sugar motifs of the two wings are the same as one another (symmetric gapmer). In certain embodiments, the sugar motif of the 5′-wing differs from the sugar motif of the 3′-wing (asymmetric gapmer). In certain embodiments, modified oligonucleotides of the present invention are not gapmers.

[0107] In certain embodiments, the wings of a gapmer comprise 1-6 nucleosides. In certain embodiments, each nucleoside of each wing of a gapmer comprises a modified sugar moiety. In certain embodiments, at least one, at least two, at least three, at least four, at least five, or at least six nucleosides of each wing of a gapmer comprises a modified sugar moiety.

[0108] In certain embodiments, the gap of a gapmer comprises 7-12 nucleosides. In certain embodiments, each nucleoside of the gap of a gapmer comprises a 2′-deoxyribosyl sugar moiety. In certain embodiments, at least one nucleoside of the gap of a gapmer comprises a modified sugar moiety and each remaining nucleoside comprises a 2′-deoxyribosyl sugar moiety.

[0109] Herein, the lengths (number of nucleosides) of the three regions of a gapmer may be provided using the notation [# of nucleosides in the 5′-wing]−[# of nucleosides in the gap]−[# of nucleosides in the 3′-wing]. Thus, a 5-10-5 gapmer consists of 5 linked nucleosides in each wing and 10 linked nucleosides in the gap. Where such nomenclature is followed by a specific modification, that modification is the modification in each sugar moiety of each wing and the gap nucleosides comprise a 2′-deoxyribosyl sugar moiety. Thus, a 5-10-5 MOE gapmer consists of 5 linked 2′-MOE nucleosides in the 5′-wing, 10 linked 2′-deoxyribonucleosides in the gap, and 5 linked 2′-MOE nucleosides in the 3′-wing.

[0110] In certain embodiments, each nucleoside of a modified oligonucleotide, or portion thereof, comprises a 2′-substituted sugar moiety, a bicyclic sugar moiety, a sugar surrogate, or a 2′-deoxyribosyl sugar moiety. In certain embodiments, the 2′-substituted sugar moiety is selected from a 2′-MOE sugar moiety, a 2′-NMA sugar moiety, a 2′-OMe sugar moiety, and a 2′-F sugar moiety. In certain embodiments, the bicyclic sugar moiety is selected from a cEt sugar moiety and an LNA sugar moiety. In certain embodiments, the sugar surrogate is selected from morpholino, modified morpholino, PNA, THP, and F-HNA.

[0111] In certain embodiments, modified oligonucleotides comprise at least 12, at least 13, at least 14, at least 15, at least 16, at least 17, at least 18, at least 19, or at least 20 nucleosides comprising a modified sugar moiety. In certain embodiments, the modified sugar moiety is selected independently from a 2′-substituted sugar moiety, a bicyclic sugar moiety, or a sugar surrogate. In certain embodiments, the 2′-substituted sugar moiety is selected from a 2′-MOE sugar moiety, a 2′-NMA sugar moiety, a 2′-OMe sugar moiety, and a 2′-F sugar moiety. In certain embodiments, the bicyclic sugar moiety is selected from a cEt sugar moiety and an LNA sugar moiety. In certain embodiments, the sugar surrogate is selected from morpholino, modified morpholino, THP, and F-HNA.

[0112] In certain embodiments, each nucleoside of a modified oligonucleotide comprises a modified sugar moiety (“fully modified oligonucleotide”). In certain embodiments, each nucleoside of a fully modified oligonucleotide comprises a 2′-substituted sugar moiety, abicyclic sugar moiety, or a sugar surrogate. In certain embodiments, the 2′-substituted sugar moiety is selected from a 2′-MOE sugar moiety, a 2′-NMA sugar moiety, a 2′-OMe sugar moiety, and a 2′-F sugar moiety. In certain embodiments, the bicyclic sugar moiety is selected from a cEt sugar moiety and an LNA sugar moiety. In certain embodiments, the sugar surrogate is selected from morpholino, modified morpholino, THP, and F-HNA. In certain embodiments, each nucleoside of a fully modified oligonucleotide comprises the same modified sugar moiety (“uniformly modified sugar motif”). In certain embodiments, the uniformly modified sugar motif is 7 to nucleosides in length. In certain embodiments, each nucleoside of the uniformly modified sugar motif comprises a 2′-substituted sugar moiety, a bicyclic sugar moiety, or a sugar surrogate. In certain embodiments, the 2′-substituted sugar moiety is selected from a 2′-MOE sugar moiety, a 2′-NMA sugar moiety, a 2′-OMe sugar moiety, and a 2′-F sugar moiety. In certain embodiments, the bicyclic sugar moiety is selected from a cEt sugar moiety and an LNA sugar moiety. In certain embodiments, the sugar surrogate is selected from morpholino, modified morpholino, THP, and F-HNA.

[0113] In certain embodiments, modified oligonucleotides have a sugar motif comprising at least 1, at least 2, at least 3, or at least 4 2′-deoxyribonucleosides, but are otherwise fully modifed. In certain embodiments, modified oligonucleotides having at least one fully modified sugar motif may also comprise not more than 1, not more than 2, not more than 3, or not more than 4 2′-deoxyribonucleosides. In certain embodiments, modified oligonucleotides having at least one fully modified sugar motif may also comprise exactly 1, exactly 2, exactly 3, or exactly 4 2′-deoxyribonucleosides. In certain embodiments, modified oligonucleotides comprise more than 4 2′-deoxyribonucleosides, provided they do not include a region comprising 4 or more contiguous 2′-deoxyribonucleosides

2. Certain Nucleobase Motifs In certain embodiments, oligonucleotides comprise modified and/or unmodified nucleobases arranged along the oligonucleotide, or portion thereof, in a defined pattern or motif. In certain embodiments, each nucleobase is modified.

[0114] In certain embodiments, none of the nucleobases are modified. In certain embodiments, each purine or each pyrimidine is modified. In certain embodiments, each adenine is modified. In certain embodiments, each guanine is modified. In certain embodiments, each thymine is modified. In certain embodiments, each uracil is modified. In certain embodiments, each cytosine is modified. In certain embodiments, some or all of the cytosine nucleobases in a modified oligonucleotide are 5-methyl cytosines. In certain embodiments, all of the cytosine nucleobases are 5-methyl cytosines and all of the other nucleobases of the modified oligonucleotide are unmodified nucleobases.

[0115] In certain embodiments, modified oligonucleotides comprise a block of modified nucleobases. In certain such embodiments, the block is at the 3′-end of the oligonucleotide. In certain embodiments the block is within 3 nucleosides of the 3′-end of the oligonucleotide. In certain embodiments, the block is at the 5′-end of the oligonucleotide. In certain embodiments the block is within 3 nucleosides of the 5′-end of the oligonucleotide.

[0116] In certain embodiments, oligonucleotides having a gapmer motif comprise a nucleoside comprising a modified nucleobase. In certain such embodiments, one nucleoside comprising a modified nucleobase is in the central gap of an oligonucleotide having a gapmer motif. In certain such embodiments, the sugar moiety of the nucleoside is a 2′-deoxyribosyl sugar moiety. In certain embodiments, the modified nucleobase is selected from: a 2-thiopyrimidine and a 5-propynepyrimidine.

### 3. Certain Internucleoside Linkage Motifs

[0117] In certain embodiments, oligonucleotides comprise modified and/or unmodified internucleoside linkages arranged along the oligonucleotide, or portion thereof, in a defined pattern or motif. In certain embodiments, each internucleoside linking group is a phosphodiester internucleoside linkage. In certain embodiments, each internucleoside linking group of a modified oligonucleotide is a phosphorothioate internucleoside linkage. In certain embodiments, each internucleoside linkage of a modified oligonucleotide is independently selected from a phosphorothioate internucleoside linkage and phosphodiester internucleoside linkage. In certain embodiments, each phosphorothioate internucleoside linkage is independently selected from a stereorandom phosphorothioate, a (Sp) phosphorothioate, and a (Rp) phosphorothioate. In certain embodiments, the sugar motif of a modified oligonucleotide is a gapmer and the internucleoside linkages within the gap are all modified. In certain such embodiments, some or all of the internucleoside linkages in the wings are unmodified phosphodiester internucleoside linkages. In certain embodiments, the terminal internucleoside linkages are modified. In certain embodiments, the sugar motif of a modified oligonucleotide is a gapmer, and the internucleoside linkage motif comprises at least one phosphodiester internucleoside linkage in at least one wing, wherein the at least one phosphodiester internucleoside linkage is not a terminal internucleoside linkage, and the remaining internucleoside linkages are phosphorothioate internucleoside linkages. In certain such embodiments, all of the phosphorothioate internucleoside linkages are stereorandom. In certain embodiments, all of the phosphorothioate internucleoside linkages in the wings are (Sp) phosphorothioates, and the gap comprises at least one Sp, Sp, Rp motif. In certain embodiments, populations of modified oligonucleotides are enriched for modified oligonucleotides comprising such internucleoside linkage motifs.

[0118] In certain embodiments, modified oligonucleotides comprise at least 1, at least 2, at least 3, at least 4, at least 5, at least 6, at least 7, at least 8, at least 9, at least 10, at least 11, at least 12, at least 13, at least 14, at least 15, at least 16, at least 17, at least 18, or at least 19 phosphodiester internucleoside linkages. In certain embodiments, modified oligonucleotides comprise at least 1, at least 2, at least 3, at least 4, at least 5, at least 6, at least 7, at least 8, at least 9, at least 10, at least 11, at least 12, at least 13, at least 14, at least 15, at least 16, at least 17, at least 18, or at least 19 phosphorothioate internucleoside linkages. In certain embodiments, modified oligonucleotides comprise at least 1, at least 2, at least 3, at least 4, or at least 5 phosphodiester internucleoside linkages and the remainder of the internucleoside linkages are phosphorothioate internucleoside linkages.

[0119] In certain embodiments, modified oligonucleotides have an internucleoside linkage motif selected from soossssssssssssss, soSosssssssssssss, sosssossssssssssS, sosssssossssssssS, sssoossssssssssss, sssssssoossssssss, sssssssssoossssss, sssssssssssoossss, sosssssssosssssss, sosssssssssosssss, sossssssssssssoss, ssosssssssssssoss, ssssosssssssSsoss, sssssoossssssssss, ssssssosssssSsoss, ssssssssossssosss, ssssssssosssSsoss, ssssssssssosSsoss, sssssssssssososss, ssssssssssssososs, and sssssssssssssooss; wherein, ‘s’ represents a phosphorothioate internucleoside linkage and ‘o’ represents a phosphodiester internucleoside linkage.

[0120] In certain embodiments, modified oligonucleotides have an internucleoside linkage motif selected from sososssssssssssss, soosssssssssssssS, sosSsosssssssssss, sosSsssosssssssss, sosSsssssosssssss, sSsoossssssssssss, sssssssoossssssss, sssssssssoossssss, and sssssssssssoossss; wherein, ‘s’ represents a phosphorothioate internucleoside linkage and ‘o’ represents a phosphodiester internucleoside linkage.

[0121] In certain embodiments, modified oligonucleotides have an internucleoside linkage motif selected from ossssssssssssssssso, ssssssssssssssssso, and osssssssssssssssss; wherein, ‘s’ represents a phosphorothioate internucleoside linkage and ‘o’ represents a phosphodiester internucleoside linkage.

### C. Certain Lengths

[0122] It is possible to increase or decrease the length of an oligonucleotide without eliminating activity. For example, in Woolf et al., Proc. Natl. Acad. Sci. USA, 1992, 89, 7305-7309, 1992), a series of oligonucleotides 13-25 nucleobases in length were tested for their ability to induce cleavage of a target nucleic acid in an oocyte injection model. Oligonucleotides 25 nucleobases in length with 8 or 11 mismatch bases near the ends of the oligonucleotides were able to direct specific cleavage of the target nucleic acid, albeit to a lesser extent than the oligonucleotides that contained no mismatches. Similarly, target specific cleavage was achieved using 13 nucleobase oligonucleotides, including those with 1 or 3 mismatches.

[0123] In certain embodiments, oligonucleotides (including modified oligonucleotides) can have any of a variety of ranges of lengths. In certain embodiments, oligonucleotides consist of X to Y linked nucleosides, where X represents the fewest number of nucleosides in the range and Y represents the largest number nucleosides in the range. In certain such embodiments, X and Y are each independently selected from 8, 9, 10, 11, 12, 13, 14, 15, 16, 17, 18, 19, 20, 21, 22, 23, 24, 25, 26, 27, 28, 29, 30, 31, 32, 33, 34, 35, 36, 37, 38, 39, 40, 41, 42, 43, 44, 45, 46, 47, 48, 49, and 50; provided that X≤Y. For example, in certain embodiments, oligonucleotides consist of 12 to 13, 12 to 14, 12 to 15, 12 to 16, 12 to 17, 12 to 18, 12 to 19, 12 to 20, 12 to 21, 12 to 22, 12 to 23, 12 to 24, 12 to 25, 12 to 26, 12 to 27, 12 to 28, 12 to 29, 12 to 30, 13 to 14, 13 to 15, 13 to 16, 13 to 17, 13 to 18, 13 to 19, 13 to 20, 13 to 21, 13 to 22, 13 to 23, 13 to 24, 13 to 25, 13 to 26, 13 to 27, 13 to 28, 13 to 29, 13 to 30, 14 to 15, 14 to 16, 14 to 17, 14 to 18, 14 to 19, 14 to 20, 14 to 21, 14 to 22, 14 to 23, 14 to 24, 14 to 25, 14 to 26, 14 to 27, 14 to 28, 14 to 29, 14 to 30, 15 to 16, 15 to 17, 15 to 18, 15 to 19, 15 to 20, 15 to 21, 15 to 22, 15 to 23, 15 to 24, 15 to 25, 15 to 26, 15 to 27, 15 to 28, 15 to 29, 15 to 30, 16 to 17, 16 to 18, 16 to 19, 16 to 20, 16 to 21, 16 to 22, 16 to 23, 16 to 24, 16 to 25, 16 to 26, 16 to 27, 16 to 28, 16 to 29, 16 to 30, 17 to 18, 17 to 19, 17 to 20, 17 to 21, 17 to 22, 17 to 23, 17 to 24, 17 to 25, 17 to 26, 17 to 27, 17 to 28, 17 to 29, 17 to 30, 18 to 19, 18 to 20, 18 to 21, 18 to 22, 18 to 23, 18 to 24, 18 to 25, 18 to 26, 18 to 27, 18 to 28, 18 to 29, 18 to 30, 19 to 20, 19 to 21, 19 to 22, 19 to 23, 19 to 24, 19 to 25, 19 to 26, 19 to 29, 19 to 28, 19 to 29, 19 to 30, 20 to 21, 20 to 22, 20 to 23, 20 to 24, 20 to 25, 20 to 26, 20 to 27, 20 to 28, 20 to 29, 20 to 30, 21 to 22, 21 to 23, 21 to 24, 21 to 25, 21 to 26, 21 to 27, 21 to 28, 21 to 29, 21 to 30, 22 to 23, 22 to 24, 22 to 25, 22 to 26, 22 to 27, 22 to 28, 22 to 29, 22 to 30, 23 to 24, 23 to 25, 23 to 26, 23 to 27, 23 to 28, 23 to 29, 23 to 30, 24 to 25, 24 to 26, 24 to 27, 24 to 28, 24 to 29, 24 to 30, 25 to 26, 25 to 27, 25 to 28, 25 to 29, 25 to 30, 26 to 27, 26 to 28, 26 to 29, 26 to 30, 27 to 28, 27 to 29, 27 to 30, 28 to 29, 28 to 30, or 29 to 30 linked nucleosides.

[0124] In certain embodiments, oligonucleotides consist of 16 linked nucleosides. In certain embodiments, oligonucleotides consist of 17 linked nucleosides. In certain embodiments, oligonucleotides consist of 18 linked nucleosides. In certain embodiments, oligonucleotides consist of 19 linked nucleosides. In certain embodiments, oligonucleotides consist of 20 linked nucleosides.

### D. Certain Modified Oligonucleotides

[0125] In certain embodiments, the above modifications (sugar, nucleobase, internucleoside linkage) are incorporated into a modified oligonucleotide. In certain embodiments, modified oligonucleotides are characterized by their modification motifs and overall lengths. In certain embodiments, such parameters are each independent of one another. Thus, unless otherwise indicated, each internucleoside linkage of an oligonucleotide having a gapmer sugar motif may be modified or unmodified and may or may not follow the gapmer modification pattern of the sugar modifications. For example, the internucleoside linkages within the wing regions of a sugar gapmer may be the same or different from one another and may be the same or different from the internucleoside linkages of the gap region of the sugar motif. Likewise, such sugar gapmer oligonucleotides may comprise one or more modified nucleobase independent of the gapmer pattern of the sugar modifications. Unless otherwise indicated, all modifications are independent of nucleobase sequence.

### E. Certain Populations of Modified Oligonucleotides

[0126] Populations of modified oligonucleotides in which all of the modified oligonucleotides of the population have the same molecular formula can be stereorandom populations or chirally enriched populations. All of the chiral centers of all of the modified oligonucleotides are stereorandom in a stereorandom population. In a chirally enriched population, at least one particular chiral center is not stereorandom in the modified oligonucleotides of the population. In certain embodiments, the modified oligonucleotides of a chirally enriched population are enriched for β-D ribosyl sugar moieties, and all of the phosphorothioate internucleoside linkages are stereorandom. In certain embodiments, the modified oligonucleotides of a chirally enriched population are enriched for both β-D ribosyl sugar moieties and at least one, particular phosphorothioate internucleoside linkage in a particular stereochemical configuration.

### F. Nucleobase Sequence

[0127] In certain embodiments, oligonucleotides (unmodified or modified oligonucleotides) are further described by their nucleobase sequence. In certain embodiments oligonucleotides have a nucleobase sequence that is complementary to a second oligonucleotide or an identified reference nucleic acid, such as a target nucleic acid. In certain such embodiments, a portion of an oligonucleotide has a nucleobase sequence that is complementary to a second oligonucleotide or an identified reference nucleic acid, such as a target nucleic acid. In certain embodiments, the nucleobase sequence of a portion or entire length of an oligonucleotide is at least 50%, at least 60%, at least 70%, at least 80%, at least 85%, at least 90%, at least 95%, or 100% complementary to the second oligonucleotide or nucleic acid, such as a target nucleic acid.

### I. Certain Oligomeric Compounds

[0128] In certain embodiments, provided herein are oligomeric compounds, which consist of an oligonucleotide (modified or unmodified) and optionally one or more conjugate groups and/or terminal groups. Conjugate groups consist of one or more conjugate moiety and a conjugate linker which links the conjugate moiety to the oligonucleotide. Conjugate groups may be attached to either or both ends of an oligonucleotide and/or at any internal position. In certain embodiments, conjugate groups are attached to the 2′-position of a nucleoside of a modified oligonucleotide. In certain embodiments, conjugate groups that are attached to either or both ends of an oligonucleotide are terminal groups. In certain such embodiments, conjugate groups or terminal groups are attached at the 3′ and/or 5′-end of oligonucleotides. In certain such embodiments, conjugate groups (or terminal groups) are attached at the 3′-end of oligonucleotides. In certain embodiments, conjugate groups are attached near the 3′-end of oligonucleotides. In certain embodiments, conjugate groups (or terminal groups) are attached at the 5′-end of oligonucleotides. In certain embodiments, conjugate groups are attached near the 5′-end of oligonucleotides.

[0129] Examples of terminal groups include but are not limited to conjugate groups, capping groups, phosphate moieties, protecting groups, abasic nucleosides, modified or unmodified nucleosides, and two or more nucleosides that are independently modified or unmodified.

### A. Certain Conjugate Groups

[0130] In certain embodiments, oligonucleotides are covalently attached to one or more conjugate groups. In certain embodiments, conjugate groups modify one or more properties of the attached oligonucleotide, including but not limited to pharmacodynamics, pharmacokinetics, stability, binding, absorption, tissue distribution, cellular distribution, cellular uptake, charge, and clearance. In certain embodiments, conjugate groups impart a new property on the attached oligonucleotide, e.g., fluorophores or reporter groups that enable detection of the oligonucleotide. Certain conjugate groups and conjugate moieties have been described previously, for example: cholesterol moiety (Letsinger et al., Proc. Natl. Acad. Sci. USA, 1989, 86, 6553-6556), cholic acid (Manoharan et al., Bioorg. Med. Chem. Lett., 1994, 4, 1053-1060), a thioether, e.g., hexyl-S-tritylthiol (Manoharan et al., Ann. N. Y. Acad. Sci., 1992, 660, 306-309; Manoharan et al., Bioorg. Med. Chem. Lett., 1993, 3, 2765-2770), a thiocholesterol (Oberhauser et al., Nucl. Acids Res., 1992, 20, 533-538), an aliphatic chain, e.g., do-decan-diol or undecyl residues (Saison-Behmoaras et al., EMBO J., 1991, 10, 1111-1118; Kabanov et al., FEBS Lett., 1990, 259, 327-330; Svinarchuk et al., Biochimie, 1993, 75, 49-54), a phospholipid, e.g., di-hexadecyl-rac-glycerol or triethyl-ammonium 1,2-di-O-hexadecyl-rac-glycero-3-H-phosphonate (Manoharan et al., Tetrahedron Lett., 1995, 36, 3651-3654; Shea et al., Nucl. Acids Res., 1990, 18, 3777-3783), a polyamine or a polyethylene glycol chain (Manoharan et al., Nucleosides & Nucleotides, 1995, 14, 969-973), or adamantane acetic acid a palmityl moiety (Mishra et al., Biochim. Biophys. Acta, 1995, 1264, 229-237), an octadecylamine or hexylamino-carbonyl-oxycholesterol moiety (Crooke et al., J. Pharmacol. Exp. Ther., 1996, 277, 923-937), a tocopherol group (Nishina et al., Molecular Therapy Nucleic Acids, 2015, 4, e220; and Nishina et al., Molecular Therapy, 2008, 16, 734-740), or a GalNAc cluster (e.g., WO2014/179620).

### 1. Conjugate Moieties

[0131] Conjugate moieties include, without limitation, intercalators, reporter molecules, polyamines, polyamides, peptides, carbohydrates, vitamin moieties, polyethylene glycols, thioethers, polyethers, cholesterols, thiocholesterols, cholic acid moieties, folate, lipids, lipophilic groups, phospholipids, biotin, phenazine, phenanthridine, anthraquinone, adamantane, acridine, fluoresceins, rhodamines, coumarins, fluorophores, and dyes.

[0132] In certain embodiments, a conjugate moiety comprises an active drug substance, for example, aspirin, warfarin, phenylbutazone, ibuprofen, suprofen, fen-bufen, ketoprofen, (S)-(+)-pranoprofen, carprofen, dansylsarcosine, 2,3,5-triiodobenzoic acid, fingolimod, flufenamic acid, folinic acid, a benzothiadiazide, chlorothiazide, a diazepine, indo-methicin, a barbiturate, a cephalosporin, a sulfa drug, an antidiabetic, an antibacterial, or an antibiotic.

### 2. Conjugate Linkers

[0133] Conjugate moieties are attached to oligonucleotides through conjugate linkers. In certain oligomeric compounds, the conjugate linker is a single chemical bond (i.e., the conjugate moiety is attached directly to an oligonucleotide through a single bond). In certain oligomeric compounds, a conjugate moiety is attached to an oligonucleotide via a more complex conjugate linker comprising one or more conjugate linker moieties, which are sub-units making up a conjugate linker. In certain embodiments, the conjugate linker comprises a chain structure, such as a hydrocarbyl chain, or an oligomer of repeating units such as ethylene glycol, nucleosides, or amino acid units.

[0134] In certain embodiments, a conjugate linker comprises one or more groups selected from alkyl, amino, oxo, amide, disulfide, polyethylene glycol, ether, thioether, and hydroxylamino. In certain such embodiments, the conjugate linker comprises groups selected from alkyl, amino, oxo, amide and ether groups. In certain embodiments, the conjugate linker comprises groups selected from alkyl and amide groups. In certain embodiments, the conjugate linker comprises groups selected from alkyl and ether groups. In certain embodiments, the conjugate linker comprises at least one phosphorus moiety. In certain embodiments, the conjugate linker comprises at least one phosphate group. In certain embodiments, the conjugate linker includes at least one neutral linking group.

[0135] In certain embodiments, conjugate linkers, including the conjugate linkers described above, are bifunctional linking moieties, e.g., those known in the art to be useful for attaching conjugate groups to parent compounds, such as the oligonucleotides provided herein. In general, a bifunctional linking moiety comprises at least two functional groups. One of the functional groups is selected to bind to a particular site on a parent compound and the other is selected to bind to a conjugate group. Examples of functional groups used in a bifunctional linking moiety include but are not limited to electrophiles for reacting with nucleophilic groups and nucleophiles for reacting with electrophilic groups. In certain embodiments, bifunctional linking moieties comprise one or more groups selected from amino, hydroxyl, carboxylic acid, thiol, alkyl, alkenyl, and alkynyl.

[0136] Examples of conjugate linkers include but are not limited to pyrrolidine, 8-amino-3,6-dioxaoctanoic acid (ADO), succinimidyl 4-(N-maleimidomethyl) cyclohexane-1-carboxylate (SMCC) and 6-aminohexanoic acid (AHEX or AHA). Other conjugate linkers include but are not limited to substituted or unsubstituted C₁-C₁₀ alkyl, substituted or unsubstituted C₂-C₁₀ alkenyl or substituted or unsubstituted C₂-C₁₀ alkynyl, wherein a nonlimiting list of preferred substituent groups includes hydroxyl, amino, alkoxy, carboxy, benzyl, phenyl, nitro, thiol, thioalkoxy, halogen, alkyl, aryl, alkenyl and alkynyl.

[0137] In certain embodiments, conjugate linkers comprise 1-10 linker-nucleosides. In certain embodiments, conjugate linkers comprise 2-5 linker-nucleosides. In certain embodiments, conjugate linkers comprise exactly 3 linker-nucleosides. In certain embodiments, conjugate linkers comprise the TCA motif. In certain embodiments, such linker-nucleosides are modified nucleosides. In certain embodiments such linker-nucleosides comprise a modified sugar moiety. In certain embodiments, linker-nucleosides are unmodified. In certain embodiments, linker-nucleosides comprise an optionally protected heterocyclic base selected from a purine, substituted purine, pyrimidine or substituted pyrimidine. In certain embodiments, a cleavable moiety is a nucleoside selected from uracil, thymine, cytosine, 4-N-benzoylcytosine, 5-methyl cytosine, 4-N-benzoyl-5-methyl cytosine, adenine, 6-N-benzoyladenine, guanine and 2-N-isobutyrylguanine. It is typically desirable for linker-nucleosides to be cleaved from the oligomeric compound after it reaches a target tissue. Accordingly, linker-nucleosides are typically linked to one another and to the remainder of the oligomeric compound through cleavable bonds. In certain embodiments, such cleavable bonds are phosphodiester bonds.

[0138] Herein, linker-nucleosides are not considered to be part of the oligonucleotide. Accordingly, in embodiments in which an oligomeric compound comprises an oligonucleotide consisting of a specified number or range of linked nucleosides and/or a specified percent complementarity to a reference nucleic acid and the oligomeric compound also comprises a conjugate group comprising a conjugate linker comprising linker-nucleosides, those linker-nucleosides are not counted toward the length of the oligonucleotide and are not used in determining the percent complementarity of the oligonucleotide for the reference nucleic acid. For example, an oligomeric compound may comprise (1) a modified oligonucleotide consisting of 8-30 nucleosides and (2) a conjugate group comprising 1-10 linker-nucleosides that are contiguous with the nucleosides of the modified oligonucleotide. The total number of contiguous linked nucleosides in such an oligomeric compound is more than 30. Alternatively, an oligomeric compound may comprise a modified oligonucleotide consisting of 8-30 nucleosides and no conjugate group. The total number of contiguous linked nucleosides in such an oligomeric compound is no more than 30. Unless otherwise indicated conjugate linkers comprise no more than 10 linker-nucleosides. In certain embodiments, conjugate linkers comprise no more than 5 linker-nucleosides. In certain embodiments, conjugate linkers comprise no more than 3 linker-nucleosides. In certain embodiments, conjugate linkers comprise no more than 2 linker-nucleosides. In certain embodiments, conjugate linkers comprise no more than 1 linker-nucleoside.

[0139] In certain embodiments, it is desirable for a conjugate group to be cleaved from the oligonucleotide. For example, in certain circumstances oligomeric compounds comprising a particular conjugate moiety are better taken up by a particular cell type, but once the oligomeric compound has been taken up, it is desirable that the conjugate group be cleaved to release the unconjugated or parent oligonucleotide. Thus, certain conjugate linkers may comprise one or more cleavable moieties. In certain embodiments, a cleavable moiety is a cleavable bond. In certain embodiments, a cleavable moiety is a group of atoms comprising at least one cleavable bond. In certain embodiments, a cleavable moiety comprises a group of atoms having one, two, three, four, or more than four cleavable bonds. In certain embodiments, a cleavable moiety is selectively cleaved inside a cell or subcellular compartment, such as a lysosome. In certain embodiments, a cleavable moiety is selectively cleaved by endogenous enzymes, such as nucleases.

[0140] In certain embodiments, a cleavable bond is selected from among: an amide, an ester, an ether, one or both esters of a phosphodiester, a phosphate ester, a carbamate, or a disulfide. In certain embodiments, a cleavable bond is one or both of the esters of a phosphodiester. In certain embodiments, a cleavable moiety comprises a phosphate or phosphodiester. In certain embodiments, the cleavable moiety is a phosphate linkage between an oligonucleotide and a conjugate moiety or conjugate group.

[0141] In certain embodiments, a cleavable moiety comprises or consists of one or more linker-nucleosides. In certain such embodiments, the one or more linker-nucleosides are linked to one another and/or to the remainder of the oligomeric compound through cleavable bonds. In certain embodiments, such cleavable bonds are unmodified phosphodiester bonds. In certain embodiments, a cleavable moiety is 2′-deoxyribonucleoside that is attached to either the 3′ or 5′-terminal nucleoside of an oligonucleotide by a phosphate internucleoside linkage and covalently attached to the remainder of the conjugate linker or conjugate moiety by a phosphate or phosphorothioate internucleoside linkage. In certain such embodiments, the cleavable moiety is 2′-deoxyadenosine.

### B. Certain Terminal Groups

[0142] In certain embodiments, oligomeric compounds comprise one or more terminal groups. In certain such embodiments, oligomeric compounds comprise a stabilized 5′-phosphate. Stabilized 5′-phosphates include, but are not limited to 5′-phosphanates, including, but not limited to 5′-vinylphosphonates. In certain embodiments, terminal groups comprise one or more abasic nucleosides and/or inverted nucleosides. In certain embodiments, terminal groups comprise one or more 2′-linked nucleosides. In certain such embodiments, the 2′-linked nucleoside is an abasic nucleoside.

### III. Oligomeric Duplexes

[0143] In certain embodiments, oligomeric compounds described herein comprise an oligonucleotide, having a nucleobase sequence complementary to that of a target nucleic acid. In certain embodiments, an oligomeric compound is paired with a second oligomeric compound to form an oligomeric duplex. Such oligomeric duplexes comprise a first oligomeric compound having a portion complementary to a target nucleic acid and a second oligomeric compound having a portion complementary to the first oligomeric compound. In certain embodiments, the first oligomeric compound of an oligomeric duplex comprises or consists of (1) a modified or unmodified oligonucleotide and optionally a conjugate group and (2) a second modified or unmodified oligonucleotide and optionally a conjugate group. Either or both oligomeric compounds of an oligomeric duplex may comprise a conjugate group. The oligonucleotides of each oligomeric compound of an oligomeric duplex may include non-complementary overhanging nucleosides.

### IV. Antisense Activity

[0144] In certain embodiments, oligomeric compounds and oligomeric duplexes are capable of hybridizing to a target nucleic acid, resulting in at least one antisense activity; such oligomeric compounds and oligomeric duplexes are antisense compounds. In certain embodiments, antisense compounds have antisense activity when they reduce, modulate, or increase the amount or activity of a target nucleic acid by 25% or more in the standard cell assay. In certain embodiments, antisense compounds selectively affect one or more target nucleic acid. Such antisense compounds comprise a nucleobase sequence that hybridizes to one or more target nucleic acid, resulting in one or more desired antisense activity and does not hybridize to one or more non-target nucleic acid or does not hybridize to one or more non-target nucleic acid in such a way that results in significant undesired antisense activity.

[0145] In certain antisense activities, hybridization of an antisense compound to a target nucleic acid results in recruitment of a protein that cleaves the target nucleic acid. For example, certain antisense compounds result in RNase H mediated cleavage of the target nucleic acid. RNase H is a cellular endonuclease that cleaves the RNA strand of an RNA:DNA duplex. The DNA in such an RNA:DNA duplex need not be unmodified DNA. In certain embodiments, provided herein are antisense compounds that are sufficiently “DNA-like” to elicit RNase H activity. In certain embodiments, one or more non-DNA-like nucleoside in the gap of a gapmer is tolerated. In certain embodiments, antisense compound of the present invention do not result in cleavage of a target nucleic acid through RNase H activity.

[0146] In certain antisense activities, an antisense compound or a portion of an antisense compound is loaded into an RNA-induced silencing complex (RISC), ultimately resulting in cleavage of the target nucleic acid. For example, certain antisense compounds result in cleavage of the target nucleic acid by Argonaute. Antisense compounds that are loaded into RISC are RNAi compounds. RNAi compounds may be double-stranded (siRNA) or single-stranded (ssRNA). In certain embodiments, antisense compound of the present invention do not result in cleavage of a target nucleic acid through RISC activity.

[0147] In certain embodiments, hybridization of an antisense compound to a target nucleic acid does not result in recruitment of a protein that cleaves that target nucleic acid. In certain embodiments, hybridization of the antisense compound to the target nucleic acid results in alteration of splicing of the target nucleic acid. In certain embodiments, hybridization of an antisense compound to a target nucleic acid results in inhibition of a binding interaction between the target nucleic acid and a protein or other nucleic acid. In certain embodiments, hybridization of an antisense compound to a target nucleic acid results in alteration of translation of the target nucleic acid. In certain embodiments, hybridization of an antisense compound to a target nucleic acid results in exon inclusion. In certain embodiments, hybridization of an antisense compound to a target nucleic acid results in an increase in the amount or activity of a target nucleic acid. In certain embodiments, hybridization of an antisense compound complementary to a target nucleic acid results in alteration of splicing, leading to the inclusion of an exon in the mRNA.

[0148] Antisense activities may be observed directly or indirectly. In certain embodiments, observation or detection of an antisense activity involves observation or detection of a change in an amount of a target nucleic acid or protein encoded by such target nucleic acid, a change in the ratio of splice variants of a nucleic acid or protein and/or a phenotypic change in a cell or subject.

### V. Certain Target Nucleic Acids

[0149] In certain embodiments, oligomeric compounds comprise or consist of an oligonucleotide comprising a portion that is complementary to a target nucleic acid. In certain embodiments, the target nucleic acid is an endogenous RNA molecule. In certain embodiments, the target nucleic acid encodes a protein. In certain such embodiments, the target nucleic acid is selected from: a mature mRNA and a pre-mRNA, including intronic, exonic and untranslated regions. In certain embodiments, the target nucleic acid is a mature mRNA. In certain embodiments, the target nucleic acid is a pre-mRNA. In certain embodiments, the target region is entirely within an intron. In certain embodiments, the target region spans an intron/exon junction. In certain embodiments, the target region is at least 50% within an intron.

### A. Complementarity/Mismatches to the Target Nucleic Acid

[0150] It is possible to introduce mismatch bases without eliminating activity. For example, Gautschi et al (J. Natl. Cancer Inst. 93:463-471, March 2001) demonstrated the ability of an oligonucleotide having 100% complementarity to the bcl-2 mRNA and having 3 mismatches to the bcl-xL mRNA to reduce the expression of both bcl-2 and bcl-xL in vitro and in vivo. Furthermore, this oligonucleotide demonstrated potent anti-tumor activity in vivo. Maher and Dolnick (Nuc. Acid. Res. 16:3341-3358, 1988) tested a series of tandem 14 nucleobase oligonucleotides, and a 28 and 42 nucleobase oligonucleotides comprised of the sequence of two or three of the tandem oligonucleotides, respectively, for their ability to arrest translation of human DHFR in a rabbit reticulocyte assay. Each of the three 14 nucleobase oligonucleotides alone was able to inhibit translation, albeit at a more modest level than the 28 or 42 nucleobase oligonucleotides.

[0151] In certain embodiments, oligonucleotides are complementary to the target nucleic acid over the entire length of the oligonucleotide. In certain embodiments, oligonucleotides are 99%, 95%, 90%, 85%, or 80% complementary to the target nucleic acid. In certain embodiments, oligonucleotides are at least 80% complementary to the target nucleic acid over the entire length of the oligonucleotide and comprise a portion that is 100% or fully complementary to a target nucleic acid. In certain embodiments, the portion of full complementarity is 6 7, 8, 9, 10, 11, 12, 13, 14, 15, 16, 17, 18, 19, or 20 nucleobases in length.

[0152] In certain embodiments, oligonucleotides comprise one or more mismatched nucleobases relative to the target nucleic acid. In certain embodiments, the mismatch is at position 1, 2, 3, 4, 5, 6, 7, 8, 9, 10, 11, 12, 13, 14, 15, 16, 17, 18, 19, or 20 from the 5′-end of the oligonucleotide.

A. Certain pre-mRNA Targets
a. SMN2

[0153] In certain embodiments, oligomeric compounds comprise or consist of a modified oligonucleotide that is complementary to a target nucleic acid encoding SMN2, or a portion thereof. In certain embodiments, the SMN2 target nucleic acid has the sequence set forth in SEQ ID NO: 1 (GENBANK Acession No. NT_006713.14 truncated from nucleotides 19939708 to 19967777).

b. SCN1A

[0154] In certain embodiments, oligomeric compounds comprise or consist of a modified oligonucleotide that is complementary to a target nucleic acid encoding SCN1A, or a portion thereof. In certain embodiments, the SCN1A target nucleic acid has the nucleobase sequence set forth in SEQ ID NO: 2 (the complement of GENBANK Accession No. NC_000002.12 truncated from nucleotides 165982001 to 166152000). In certain embodiments, the SCN1A target nucleic acid has the nucleobase sequence set forth in SEQ ID NO: 3 (GENBANK Accession No. NM_001165963.2).

c. DMD

[0155] In certain embodiments, oligomeric compounds comprise or consist of a modified oligonucleotide that is complementary to a target nucleic acid encoding DMD, or a portion thereof. In certain embodiments, the DMD target nucleic acid has the nucleobase sequence set forth in SEQ ID NO: 75 (the complement of GENBANK Accession No. NC_000023.11 truncated from nucleotides 31116001 to 33343000). In certain embodiments, the DMD target nucleic acid has the nucleobase sequence set forth in SEQ ID NO: 76 (GENBANK Accession No. NM_004007.1).

d. APP

[0156] In certain embodiments, oligomeric compounds comprise or consist of a modified oligonucleotide that is complementary to a target nucleic acid encoding APP, or a portion thereof. In certain embodiments, the APP target nucleic acid has the sequence set forth in SEQ ID NO: 68 (the cDNA of Ensembl transcript ENST00000346798.7) or the complement of SEQ ID NO: 69 (GENBANK Accession No. NC_000021.9 truncated from nucleotides 25878001 to 26174000). In certain embodiments, the APP target nucleic acid has the sequence set forth in any of known splice variants of APP, including but not limited to SEQ ID NO: 70 (the cDNA of Ensembl transcript ENST00000357903.7), SEQ ID NO: 71 (the cDNA of Ensembl transcript ENST00000348990.9), SEQ ID NO: 72 (the cDNA of Ensembl transcript ENST00000440126.7), SEQ ID NO: 73 (the cDNA of Ensembl transcript ENST00000354192.7), and/or SEQ ID NO: 74 (the cDNA of Ensembl transcript ENST00000358918.7).

e. ATXN3

[0157] In certain embodiments, oligomeric compounds comprise or consist of a modified oligonucleotide that is complementary to ATXN3, or a portion thereof. In certain embodiments, the ATXN3 target nucleic acid has the sequence set forth in SEQ ID NO: 77 (GENBANK Accession No: NM_004993.5), or SEQ ID NO: 78 (the complement of GENBANK Accession No NC_000014.9 truncated from nucleotides 92,056,001 to 92,110,000).

f. SmgGDS

[0158] In certain embodiments, oligomeric compounds comprise or consist of a modified oligonucleotide that is complementary to a target nucleic acid encoding SmgGDS, or a portion thereof. In certain embodiments, the SmgGDS target nucleic acid has the sequence set forth in SEQ ID NO: 79 (GENBANK Accession No. NT_016354.20 truncated from nucleotides 39338995 to 39523480. In certain embodiments, the SmgGDS target nucleic acid has the nucleobase sequence set forth in SEQ ID NO: 80 (GENBANK Accession No. NM_021159.4).

g. PK-M

[0159] In certain embodiments, oligomeric compounds comprise or consist of a modified oligonucleotide that is complementary to a target nucleic acid encoding PK-M, or a portion thereof. In certain embodiments, the PK-M target nucleic acid has the sequence set forth in SEQ ID NO: 81 (the complement of GENBANK Accession No. NT_010194.16 truncated from nucleotides 43281289 to 43314403. In certain embodiments, the PK-M target nucleic acid has the nucleobase sequence set forth in SEQ ID NO: 82 (GENBANK Accession No. NM_002654.4).

h. MAPT

[0160] In certain embodiments, oligomeric compounds comprise or consist of a modified oligonucleotide that is complementary to a target nucleic acid encoding MAPT, or a portion thereof. In certain embodiments, the MAPT target nucleic acid has the sequence set forth in SEQ ID NO: 83 (GENBANK Accession No. NT_010783.15 truncated from nucleotides 9240000 to 9381000. In certain embodiments, the MAPT target nucleic acid has the nucleobase sequence set forth in SEQ ID NO: 84 (GENBANK Accession No. NM_001123066.3).

i. LRP8

[0161] In certain embodiments, oligomeric compounds comprise or consist of a modified oligonucleotide that is complementary to a target nucleic acid encoding LRP8, or a portion thereof. In certain embodiments, the LRP8 target nucleic acid has the sequence set forth in SEQ ID NO: 85 (the complement of GENBANK Accession No. NT_032977.7 truncated from nucleotides 7530205 to 7613614. In certain embodiments, the LRP8 target nucleic acid has the nucleobase sequence set forth in SEQ ID NO: 86 (GENBANK Accession No. NM_004631.3).

j. CLN3

[0162] In certain embodiments, oligomeric compounds comprise or consist of a modified oligonucleotide that is complementary to a target nucleic acid encoding CLN3, or a portion thereof. In certain embodiments, the CLN3 target nucleic acid has the sequence set forth in SEQ ID NO: 87 (the complement of GENBANK Accession No: NT_010393.16 truncated from nucleotides 28427600 to 28444620). In certain embodiments, the CLN3 target nucleic acid has the sequence set forth in SEQ ID NO: 89 (GENBANK accession number NM_001042432.1), SEQ ID NO: 90 (GENBANK accession number NM_000086.2), or SEQ ID NO: 91 (GENBANK accession number NM_001286110.1).

k. IKBKAP

[0163] In certain embodiments, oligomeric compounds comprise or consist of a modified oligonucleotide that is complementary to a target nucleic acid encoding IKBKAP, or a portion thereof. In certain embodiments, the IKBKAP target nucleic acid has the sequence set forth in SEQ ID NO: 92 (the complement of GENBANK Accession No. NT_008470.16 truncated from nucleotides 13290828 to 13358424. In certain embodiments, the IKBKAP target nucleic acid has the nucleobase sequence set forth in SEQ ID NO: 93 (GENBANK Accession No. NM_003640.4).

l. USH1C

[0164] In certain embodiments, oligomeric compounds comprise or consist of a modified oligonucleotide that is complementary to a target nucleic acid encoding USH1C, or a portion thereof. In certain embodiments, the USH1C target nucleic acid has the sequence set forth in SEQ ID NO: 94 (the complement of GENBANK Accession No. NT_009237.18 truncated from nucleotides 17454440 to 17506950. In certain embodiments, the USH1C target nucleic acid has the nucleobase sequence set forth in SEQ ID NO: 95 (GENBANK Accession No. NM_005709.3), or SEQ ID NO: 96 (NM 153676.3).

m. LMNA

[0165] In certain embodiments, oligomeric compounds comprise or consist of a modified oligonucleotide that is complementary to a target nucleic acid encoding LMNA, or a portion thereof. In certain embodiments, the LMNA target nucleic acid has the sequence set forth in SEQ ID NO: 97 (GENBANK Accession No. NT_079484.1 truncated from nucleotides 2533930 to 2560103. In certain embodiments, the LMNA target nucleic acid has the nucleobase sequence set forth in SEQ ID NO: 98 (GENBANK Accession No. NM_170707.1).

n. Dysferlin

[0166] In certain embodiments, oligomeric compounds comprise or consist of a modified oligonucleotide that is complementary to a target nucleic acid encoding Dysferlin, or a portion thereof. In certain embodiments, the Dysferlin target nucleic acid has the sequence set forth in SEQ ID NO: 99 (ENSEMBL Accession No. ENSG00000135636.14 from ENSEMBL version 99: January 2020 located on the forward strand of Chromosome 2 from positions 71,453,722 to 71,686,768. In certain embodiments, the Dysferlin target nucleic acid has the nucleobase sequence set forth in SEQ ID NO: 100 (GENBANK Accession No. NM_003494.1).

o. TGFBR1

[0167] In certain embodiments, oligomeric compounds comprise or consist of a modified oligonucleotide that is complementary to a target nucleic acid encoding TGFBR1, or a portion thereof. In certain embodiments, the TGFBR1 target nucleic acid has the sequence set forth in SEQ ID NO: 101 (GENBANK Accession No. NT_008470.17 truncated from nucleotides 9186000 to 9239000. In certain embodiments, the TGFBR1 target nucleic acid has the nucleobase sequence set forth in SEQ ID NO: 102 (GENBANK Accession No. NM_004612.2).

### p. C5

[0168] In certain embodiments, oligomeric compounds comprise or consist of a modified oligonucleotide that is complementary to a target nucleic acid encoding C₅, or a portion thereof. In certain embodiments, the C₅ target nucleic acid has the sequence set forth in SEQ ID NO: 103 (the complement of GENBANK Accession No. NC_000009.12 truncated from nucleotides 120949001 to 121078000. In certain embodiments, the C₅ target nucleic acid has the nucleobase sequence set forth in SEQ ID NO: 104 (GENBANK Accession No. NM_001735.2).

q. PKD1

[0169] In certain embodiments, oligomeric compounds comprise or consist of a modified oligonucleotide that is complementary to a target nucleic acid encoding PKD1, or a portion thereof. In certain embodiments, the PKD1 target nucleic acid has the sequence set forth in SEQ ID NO: 105 (the complement of GENBANK Accession No. NT_010393.16 truncated from nucleotides 2077700 to 2126900. In certain embodiments, the PKD1 target nucleic acid has the nucleobase sequence set forth in SEQ ID NO: 106 (GENBANK Accession No. NM_000296.3).

r. ATXN1

[0170] In certain embodiments, oligomeric compounds comprise or consist of a modified oligonucleotide that is complementary to a target nucleic acid encoding ATXN1, or a portion thereof. In certain embodiments, the ATXN1 target nucleic acid has the sequence set forth in SEQ ID NO: 107 (GENBANK Accession No. NM_000332.3). In certain embodiments, the ATXN1 target nucleic acid has the sequence set forth in or in SEQ ID NO: 108 (the complement of GENBANK Accession No. NC_000006.12 truncated from nucleotides 16296001 to 16764000). In certain embodiments, the ATXN1 target nucleic acid has the sequence set forth in SEQ ID NO: 109 (GENBANK Accession No. NM_001128164.1).

s. ATXN7

[0171] In certain embodiments, oligomeric compounds comprise or consist of a modified oligonucleotide that is complementary to a target nucleic acid encoding ATXN7, or a portion thereof. In certain embodiments, the ATXN7 target nucleic acid has the sequence set forth in SEQ ID NO: 110 (GENBANK Accession No. NT_022517.17 truncated from nucleotides 63789000 to 63/931,000. In certain embodiments, the ATXN7 target nucleic acid has the nucleobase sequence set forth in SEQ ID NO: 111 (GENBANK Accession No. NM_000333.3).

t. CACNA1A

[0172] In certain embodiments, oligomeric compounds comprise or consist of a modified oligonucleotide that is complementary to a target nucleic acid encoding CACNA1A, or a portion thereof. In certain embodiments, the CACNA1A target nucleic acid has the sequence set forth in SEQ ID NO: 112 (the complement of GENBANK Accession No. NC_000019.10 truncated from nucleotides 13203001 to 13509000. In certain embodiments, the CACNA1A target nucleic acid has the nucleobase sequence set forth in SEQ ID NO: 113 (GENBANK Accession No. NM_000068.3).

u. HTT

[0173] In certain embodiments, oligomeric compounds comprise or consist of a modified oligonucleotide that is complementary to a target nucleic acid encoding HTT, or a portion thereof. In certain embodiments, the HTT target nucleic acid has the sequence set forth in SEQ ID NO: 114 (GENBANK Accession No. NC_000004.12 truncated from nucleotides 3072001 to 3247000. In certain embodiments, the HTT target nucleic acid has the nucleobase sequence set forth in SEQ ID NO: 115 (GENBANK Accession No. NM_002111.8).

v. ATN1

[0174] In certain embodiments, oligomeric compounds comprise or consist of a modified oligonucleotide that is complementary to a target nucleic acid encoding ATN1, or a portion thereof. In certain embodiments, the ATN1 target nucleic acid has the sequence set forth in SEQ ID NO: 116 (GENBANK Accession No. NC_000012.12 truncated from nucleotides 6923463 to 6943321. In certain embodiments, the ATN1 target nucleic acid has the nucleobase sequence set forth in SEQ ID NO: 117 (GENBANK Accession No. NM_001007026.1).

w. TBP

[0175] In certain embodiments, oligomeric compounds comprise or consist of a modified oligonucleotide that is complementary to a target nucleic acid encoding TBP, or a portion thereof. In certain embodiments, the TBP nucleic acid has the sequence set forth in SEQ ID NO: 118 (ENSEMBL Accession No. ENSG00000112592.14 from ENSEMBL version 99: January 2020 located on the forward strand of Chromosome 6 from positions 170,554,302-170,572,870. In certain embodiments, the TBP target nucleic acid has the nucleobase sequence set forth in SEQ ID NO: 119 (GENBANK Accession No. NM_001172085.1).

x. IL-1RAP

[0176] In certain embodiments, oligomeric compounds comprise or consist of a modified oligonucleotide that is complementary to a target nucleic acid encoding IL-1RAP, or a portion thereof. In certain embodiments, the IL-1RAP target nucleic acid has the sequence set forth in SEQ ID NO: 120 (GENBANK Accession No. NT_022171.13 truncated from nucleotides 4836026 to 4862758. In certain embodiments, the IL-1RAP target nucleic acid has the nucleobase sequence set forth in SEQ ID NO: 121 (GENBANK Accession No. NM_000877.2).

### B. Certain Target Nucleic Acids in Certain Tissues

[0177] In certain embodiments, oligomeric compounds comprise or consist of an oligonucleotide comprising a portion that is complementary to a target nucleic acid, wherein the target nucleic acid is expressed in a pharmacologically relevant tissue. In certain embodiments, the pharmacologically relevant tissues are the cells and tissues that comprise the central nervous system (CNS). Such tissues include brain tissues, such as, spinal cord, cortex, and coronal brain tissue.

### VI. Certain Pharmaceutical Compositions

[0178] In certain embodiments, described herein are pharmaceutical compositions comprising one or more oligomeric compounds. In certain embodiments, the one or more oligomeric compounds each consists of a modified oligonucleotide. In certain embodiments, the pharmaceutical composition comprises a pharmaceutically acceptable diluent or carrier. In certain embodiments, a pharmaceutical composition comprises or consists of a sterile saline solution and one or more oligomeric compound. In certain embodiments, the sterile saline is pharmaceutical grade saline. In certain embodiments, a pharmaceutical composition comprises or consists of one or more oligomeric compound and sterile water. In certain embodiments, the sterile water is pharmaceutical grade water. In certain embodiments, a pharmaceutical composition comprises or consists of one or more oligomeric compound and phosphate-buffered saline (PBS). In certain embodiments, the sterile PBS is pharmaceutical grade PBS. In certain embodiments, a pharmaceutical composition comprises or consists of one or more oligomeric compound and artificial cerebrospinal fluid (“artificial CSF” or “aCSF”). In certain embodiments, the artificial cerebrospinal fluid is pharmaceutical grade.

[0179] In certain embodiments, a pharmaceutical composition comprises a modified oligonucleotide and artificial cerebrospinal fluid. In certain embodiments, a pharmaceutical composition consists of a modified oligonucleotide and artificial cerebrospinal fluid. In certain embodiments, a pharmaceutical composition consists essentially of a modified oligonucleotide and artificial cerebrospinal fluid. In certain embodiments, the artificial cerebrospinal fluid is pharmaceutical grade.

[0180] In certain embodiments, pharmaceutical compositions comprise one or more oligomeric compound and one or more excipients. In certain embodiments, excipients are selected from water, salt solutions, alcohol, polyethylene glycols, gelatin, lactose, amylase, magnesium stearate, talc, silicic acid, viscous paraffin, hydroxymethylcellulose and polyvinylpyrrolidone.

[0181] In certain embodiments, oligomeric compounds may be admixed with pharmaceutically acceptable active and/or inert substances for the preparation of pharmaceutical compositions or formulations. Compositions and methods for the formulation of pharmaceutical compositions depend on a number of criteria, including, but not limited to, route of administration, extent of disease, or dose to be administered.

[0182] In certain embodiments, pharmaceutical compositions comprising an oligomeric compound encompass any pharmaceutically acceptable salts of the oligomeric compound, esters of the oligomeric compound, or salts of such esters. In certain embodiments, pharmaceutical compositions comprising oligomeric compounds comprising one or more oligonucleotide, upon administration to a subject, including a human, are capable of providing (directly or indirectly) the biologically active metabolite or residue thereof. Accordingly, for example, the disclosure is also drawn to pharmaceutically acceptable salts of oligomeric compounds, prodrugs, pharmaceutically acceptable salts of such prodrugs, and other bioequivalents. Suitable pharmaceutically acceptable salts include, but are not limited to, sodium and potassium salts. In certain embodiments, prodrugs comprise one or more conjugate group attached to an oligonucleotide, wherein the conjugate group is cleaved by endogenous nucleases within the body. In certain embodiments, prodrugs comprise one or more conjugate group attached to an oligonucleotide, wherein the conjugate group is cleaved by endogenous nucleases within the body.

[0183] Lipid moieties have been used in nucleic acid therapies in a variety of methods. In certain such methods, the nucleic acid, such as an oligomeric compound, is introduced into preformed liposomes or lipoplexes made of mixtures of cationic lipids and neutral lipids. In certain methods, DNA complexes with mono- or poly-cationic lipids are formed without the presence of a neutral lipid. In certain embodiments, a lipid moiety is selected to increase distribution of a pharmaceutical agent to a particular cell or tissue. In certain embodiments, a lipid moiety is selected to increase distribution of a pharmaceutical agent to fat tissue. In certain embodiments, a lipid moiety is selected to increase distribution of a pharmaceutical agent to muscle tissue.

[0184] In certain embodiments, pharmaceutical compositions comprise a delivery system. Examples of delivery systems include, but are not limited to, liposomes and emulsions. Certain delivery systems are useful for preparing certain pharmaceutical compositions including those comprising hydrophobic compounds. In certain embodiments, certain organic solvents such as dimethylsulfoxide are used.

[0185] In certain embodiments, pharmaceutical compositions comprise one or more tissue-specific delivery molecules designed to deliver the one or more pharmaceutical agents comprising an oligomeric compound provided herein to specific tissues or cell types. For example, in certain embodiments, pharmaceutical compositions include liposomes coated with a tissue-specific antibody.

[0186] In certain embodiments, pharmaceutical compositions comprise a co-solvent system. Certain of such co-solvent systems comprise, for example, benzyl alcohol, a nonpolar surfactant, a water-miscible organic polymer, and an aqueous phase. In certain embodiments, such co-solvent systems are used for hydrophobic compounds. A non-limiting example of such a co-solvent system is the VPD co-solvent system, which is a solution of absolute ethanol comprising 3% w/v benzyl alcohol, 8% w/v of the nonpolar surfactant Polysorbate 80™ and 65% w/v polyethylene glycol 300. The proportions of such co-solvent systems may be varied considerably without significantly altering their solubility and toxicity characteristics. Furthermore, the identity of co-solvent components may be varied: for example, other surfactants may be used instead of Polysorbate 80™; the fraction size of polyethylene glycol may be varied; other biocompatible polymers may replace polyethylene glycol, e.g., polyvinyl pyrrolidone; and other sugars or polysaccharides may substitute for dextrose.

[0187] In certain embodiments, pharmaceutical compositions are prepared for oral administration. In certain embodiments, pharmaceutical compositions are prepared for buccal administration. In certain embodiments, a pharmaceutical composition is prepared for administration by injection (e.g., intravenous, subcutaneous, intramuscular, intrathecal (IT), intracerebroventricular (ICV), etc.). In certain of such embodiments, a pharmaceutical composition comprises a carrier and is formulated in aqueous solution, such as water or physiologically compatible buffers such as Hanks's solution, Ringer's solution, or physiological saline buffer. In certain embodiments, other ingredients are included (e.g., ingredients that aid in solubility or serve as preservatives). In certain embodiments, injectable suspensions are prepared using appropriate liquid carriers, suspending agents and the like. Certain pharmaceutical compositions for injection are presented in unit dosage form, e.g., in ampoules or in multi-dose containers. Certain pharmaceutical compositions for injection are suspensions, solutions or emulsions in oily or aqueous vehicles, and may contain formulatory agents such as suspending, stabilizing and/or dispersing agents. Certain solvents suitable for use in pharmaceutical compositions for injection include, but are not limited to, lipophilic solvents and fatty oils, such as sesame oil, synthetic fatty acid esters, such as ethyl oleate or triglycerides, and liposomes.

[0188] Under certain conditions, certain compounds disclosed herein act as acids. Although such compounds may be drawn or described in protonated (free acid) form, or ionized and in association with a cation (salt) form, aqueous solutions of such compounds exist in equilibrium among such forms. For example, a phosphate linkage of an oligonucleotide in aqueous solution exists in equilibrium among free acid, anion and salt forms. Unless otherwise indicated, compounds described herein are intended to include all such forms. Moreover, certain oligonucleotides have several such linkages, each of which is in equilibrium. Thus, oligonucleotides in solution exist in an ensemble of forms at multiple positions all at equilibrium. The term “oligonucleotide” is intended to include all such forms. Drawn structures necessarily depict a single form. Nevertheless, unless otherwise indicated, such drawings are likewise intended to include corresponding forms. Herein, a structure depicting the free acid of a compound followed by the term “or a salt thereof” expressly includes all such forms that may be fully or partially protonated/de-protonated/in association with a cation. In certain instances, one or more specific cation is identified.

[0189] In certain embodiments, modified oligonucleotides or oligomeric compounds are in aqueous solution with sodium. In certain embodiments, modified oligonucleotides or oligomeric compounds are in aqueous solution with potassium. In certain embodiments, modified oligonucleotides or oligomeric compounds are in PBS. In certain embodiments, modified oligonucleotides or oligomeric compounds are in water. In certain such embodiments, the pH of the solution is adjusted with NaOH and/or HCl to achieve a desired pH.

[0190] Herein, certain specific doses are described. A dose may be in the form of a dosage unit. For clarity, a dose (or dosage unit) of a modified oligonucleotide or an oligomeric compound in milligrams indicates the mass of the free acid form of the modified oligonucleotide or oligomeric compound. As described above, in aqueous solution, the free acid is in equilibrium with anionic and salt forms. However, for the purpose of calculating dose, it is assumed that the modified oligonucleotide or oligomeric compound exists as a solvent-free, sodium-acetate free, anhydrous, free acid. For example, where a modified oligonucleotide or an oligomeric compound is in solution comprising sodium (e.g., saline), the modified oligonucleotide or oligomeric compound may be partially or fully de-protonated and in association with Na+ ions. However, the mass of the protons are nevertheless counted toward the weight of the dose, and the mass of the Na+ ions are not counted toward the weight of the dose. Thus, for example, a dose, or dosage unit, of 10 mg of Compound No. 1263789, Compound No. 1287717, Compound No. 1287745, and Compound No. 1358996 equals the number of fully protonated molecules that weighs 10 mg. This would be equivalent to 10.53 mg of solvent-free, sodium acetate-free, anhydrous sodiated Compound No. 1263789, 10.53 mg of solvent-free, sodium acetate-free, anhydrous sodiated Compound No. 1287717, 10.52 mg of solvent-free, sodium acetate-free, anhydrous sodiated Compound No. 1287745, and 10.51 mg of solvent-free, sodium acetate-free, anhydrous sodiated Compound No. 1358996. When an oligomeric compound comprises a conjugate group, the mass of the conjugate group is included in calculating the dose of such oligomeric compound. If the conjugate group also has an acid, the conjugate group is likewise assumed to be fully protonated for the purpose of calculating dose.

### VI. Certain Comparator Compositions

[0191] In certain embodiments, Spinraza® (generic name nusinersen; Compound No. 396443), approved for treatment of SMA, is a comparator compound (See, e.g., Chiroboga, et al., Neurology, 86(10): 890-897, 2016; Finkel, et al., Lancet, 338(10063): 3017-3026, 2016; Finkel, et al., N. Engl. J. Med., 377(18):1723-1732 2017; Mercuri, et al., N. Engl. J. Med., 378(7):625-635, 2018; Montes, et al., Muscle Nerve. 60(4): 409-414, 2019; Darras, et al., Neurology, 92(21):e2492-e2506, 2019). Spinraza® was previously described in WO2010120820, incorporated herein by reference, and has a sequence (from 5′ to 3′) of TCACTTTCATAATGCTGG (SEQ ID NO: 42), wherein each nucleoside comprises a 2′-MOE sugar moiety, each internucleoside linkage is a phosphorothioate internucleoside linkage, and each cytosine is a 5-methyl cytosine.

[0192] In certain embodiments, Compound No. 387954 is a comparator compound. Compound No. 387954 was previously described in WO 2014/179620, incorporated herein by reference. Compound No. 387954 has a sequence (from 5′ to 3′) of ATTCACTTTCATAATGCTGG (SEQ ID NO: 45), wherein each nucleoside comprises a 2′-MOE sugar moiety, each internucleoside linkage is a phosphorothioate internucleoside linkage, and each cytosine is a 5-methyl cytosine.

[0193] In certain embodiments, Compound No. 396442 is a comparator compound. Compound No. 396442 was previously described in WO 2010/120820, incorporated herein by reference. Compound No. 396442 has a sequence (from 5′ to 3′) of CACTTTCATAATGCTGGC (SEQ ID NO: 38), wherein each nucleoside comprises a 2′-MOE sugar moiety, each internucleoside linkage is a phosphorothioate internucleoside linkage, and each cytosine is a 5-methyl cytosine.

[0194] In certain embodiments, Compound No. 443305 is a comparator compound. Compound No. 443305 was previously described in WO 2018/014041, incorporated herein by reference. Compound No. 443305 has a sequence (from 5′ to 3′) of TCACTTTCATAATGCTGG (SEQ ID NO: 42), wherein each nucleoside comprises a 2′-NMA sugar moiety, each internucleoside linkage is a phosphorothioate internucleoside linkage, and each cytosine is a 5-methyl cytosine.

Certain Comparator Compositions

| | Nucleo- | | Inter- | | |
|---|---|---|---|---|---|
| | base | | nucleo- | | |
| | Sequence | | side | SEQ | |
| Compound | (5′ to | Sugar | Linkage | ID | Reference |
| Number | 3′) | Motif | Motif | NO: | Number |
| 396443 | TCACTTTCA | Full 2′- | Full PS | 42 | WO 2010/ |
| | TAATGCTGG | MOE | | | 120820 |
| 387954 | ATTCACTTT | Full 2′- | Full PS | 45 | WO 2014/ |
| | CATAATGCT | MOE | | | 179620 |
| | GG | | | | |
| 396442 | CACTTTCAT | Full 2′- | Full PS | 38 | WO 2010/ |
| | AATGCTGGC | MOE | | | 120820 |
| 443305 | TCACTTTCA | Full 2′- | Full PS | 42 | WO 2018/ |
| | TAATGCTGG | NMA | | | 014041 |
| 819735 | CACTTTCAT | Full 2′- | Full PS | 38 | WO 2018/ |
| | AATGCTGGC | NMA | | | 014041 |

[0195] In certain embodiments, compounds described herein having certain internucleoside and/or sugar motifs are superior relative to compounds described in WO 2007/002390, WO2010/120820, WO 2015/161170, and WO 2018/014041, and because they demonstrate one or more improved properties, such as, potency, efficacy, and/or tolerability.

### Nonlimiting Disclosure and Incorporation by Reference

[0196] Each of the literature and patent publications listed herein is incorporated by reference in its entirety. While certain compounds, compositions and methods described herein have been described with specificity in accordance with certain embodiments, the following examples serve only to illustrate the compounds described herein and are not intended to limit the same. Each of the references, GenBank accession numbers, and the like recited in the present application is incorporated herein by reference in its entirety.

[0197] Although the sequence listing accompanying this filing identifies each sequence as either “RNA” or “DNA” as required, in reality, those sequences may be modified with any combination of chemical modifications. One of skill in the art will readily appreciate that such designation as “RNA” or “DNA” to describe modified oligonucleotides is, in certain instances, arbitrary. For example, an oligonucleotide comprising a nucleoside comprising a 2′-OH sugar moiety and a thymine base could be described as a DNA having a modified sugar moiety (2′-OH in place of one 2′-H of DNA) or as an RNA having a modified base (thymine (methylated uracil) in place of a uracil of RNA). Accordingly, nucleic acid sequences provided herein, including, but not limited to those in the sequence listing, are intended to encompass nucleic acids containing any combination of natural or modified RNA and/or DNA, including, but not limited to such nucleic acids having modified nucleobases. By way of further example and without limitation, an oligomeric compound having the nucleobase sequence “ATCGATCG” encompasses any oligomeric compounds having such nucleobase sequence, whether modified or unmodified, including, but not limited to, such compounds comprising RNA bases, such as those having sequence “AUCGAUCG” and those having some DNA bases and some RNA bases such as “AUCGATCG” and oligomeric compounds having other modified nucleobases, such as “AT^{m}CGAUCG,” wherein ^{m}C indicates a cytosine base comprising a methyl group at the 5-position.

[0198] Certain compounds described herein (e.g., modified oligonucleotides) have one or more asymmetric center and thus give rise to enantiomers, diastereomers, and other stereoisomeric configurations that may be defined, in terms of absolute stereochemistry, as (R) or (S), as a or $ such as for sugar anomers, or as (D) or (L), such as for amino acids, etc. Compounds provided herein that are drawn or described as having certain stereoisomeric configurations include only the indicated compounds. Compounds provided herein that are drawn or described with undefined stereochemistry include all such possible isomers, including their stereorandom and optically pure forms, unless specified otherwise. Likewise, all cis- and trans-isomers and tautomeric forms of the compounds herein are also included unless otherwise indicated. Oligomeric compounds described herein include chirally pure or enriched mixtures as well as racemic mixtures. For example, oligomeric compounds having a plurality of phosphorothioate internucleoside linkages include such compounds in which chirality of the phosphorothioate internucleoside linkages is controlled or is random. Unless otherwise indicated, compounds described herein are intended to include corresponding salt forms.

[0199] The compounds described herein include variations in which one or more atoms are replaced with a non-radioactive isotope or radioactive isotope of the indicated element. For example, compounds herein that comprise hydrogen atoms encompass all possible deuterium substitutions for each of the ¹H hydrogen atoms. Isotopic substitutions encompassed by the compounds herein include but are not limited to: ²H or ³H in place of ¹H, ¹³C or ¹⁴C in place of ¹²C, ¹⁵N in place of ¹⁴N, ¹⁷O or ¹⁸O in place of ¹⁶O and ³³S, ³⁴S, ³⁵S, or ³⁶S in place of ³²S. In certain embodiments, non-radioactive isotopic substitutions may impart new properties on the oligomeric compound that are beneficial for use as a therapeutic or research tool. In certain embodiments, radioactive isotopic substitutions may make the compound suitable for research or diagnostic purposes such as imaging.

### EXAMPLES

[0200] The following examples illustrate certain embodiments of the present disclosure and are not limiting. Moreover, where specific embodiments are provided, the inventors have contemplated generic application of those specific embodiments.

### Example 1: Design of Modified Oligonucleotides Complementary to a Human SMN2 Nucleic Acid

[0201] Modified oligonucleotides complementary to a human SMN2 nucleic acid were designed and synthesized as indicated in the tables below.

[0202] The modified oligonucleotides in the tables below are 16, 17, 18, 19, or 20 nucleosides in length, as specified. The modified oligonucleotides comprise 2′-MOE sugar moieties, 2′-NMA sugar moieties, cEt sugar moieties, 2′-OMe sugar moieties, and/or 2′-β-D-deoxyribosyl sugar moieties, as specified. Each internucleoside linkage throughout the modified oligonucleotides is either a phosphorothioate internucleoside linkage or a phosphodiester internucleoside linkage, as specified. Cytosines are either non-methylated cytosines or 5-methyl cytosines, as specified.

[0203] Each modified oligonucleotide listed in the tables below is 100% complementary to SEQ ID NO: 1 (GENBANK Acession No. NT_006713.14 truncated from nucleotides 19939708 to 19967777), unless specifically stated otherwise. Non-complementary nucleobases are specified in the Nucleobase Sequence column in underlined, bold, italicized font. Each modified oligonucleotide listed in the tables below targets an active site on the SMN2 transcript for inclusion of exon 7. “Start site” indicates the 5′-most nucleoside to which the modified oligonucleotide is complementary in the target nucleic acid sequence. “Stop site” indicates the 3′-most nucleoside to which the modified oligonucleotide is complementary in the target nucleic acid sequence.

### Table 1

[0204] The modified oligonucleotides in Table 1 below are 16, 17, 18, 19 or 20 nucleosides in length. Each nucleoside comprises a 2′-MOE sugar moiety. The sugar motif for each modified oligonucleotide is provided in the Sugar Motif column, wherein each ‘e’ represents a 2′-MOE sugar moiety. Each internucleoside linkage is either a phosphorothioate internucleoside linkage or a phosphodiester internucleoside linkage. The internucleoside linkage motif for each modified oligonucleotide is provided in the Internucleoside Linkage Motif column, wherein each ‘s’ represents a phosphorothioate internucleoside linkage, and each ‘o’ represents a phosphodiester internucleoside linkage. Each cytosine is a 5-methyl cytosine.

[0205] Each modified oligonucleotide listed in Table 1 below is 100% complementary to SEQ ID NO: 1 (GENBANK Acession No. NT_006713.14 truncated from nucleotides 19939708 to 19967777), unless specifically stated otherwise. Non-complementary nucleobases are specified in the Nucleobase Sequence column in underlined, bold, italicized font. “Start site” indicates the 5′-most nucleoside to which the modified oligonucleotide is complementary in the target nucleic acid sequence. “Stop site” indicates the 3′-most nucleoside to which the modified oligonucleotide is complementary in the target nucleic acid sequence.

TABLE 1
2′-MOE modified oligonucleotides with PS or mixed PS/PO internucleoside linkages

| | | | | SEQ | SEQ | |
|---|---|---|---|---|---|---|
| | | | | ID | ID | |
| | | | Internucleoside | No: 1 | No: 1 | SEQ |
| Compound | Nucleobase Sequence | | Linkage Motif | Start | Stop | ID |
| Number | (5′ to 3′) | Sugar Motif (5′ to 3′) | (5′ to 3′) | Site | Site | No. |
| 1287063 | ACTTTCATAATGCTGGCAG | eeeeeeeeeeeeeeeeeee | ssssssssssssssssss | 27059 | 27077 | 32 |
| 1287048 | CACTTTCATAATGCTGGCAG | eeeeeeeeeeeeeeeeeeee | sssssssssssssssssss | 27059 | 27078 | 33 |
| 1287064 | CACTTTCATAATGCTGGCA | eeeeeeeeeeeeeeeeeee | ssssssssssssssssss | 27060 | 27078 | 34 |
| 1287049 | TCACTTTCATAATGCTGGCA | eeeeeeeeeeeeeeeeeeee | sssssssssssssssssss | 27060 | 27079 | 35 |
| 1210340 | CTTTCATAATGCTGGC | eeeeeeeeeeeeeeee | sssssssssssssss | 27061 | 27076 | 36 |
| 1212868 | CTTTCATAATGCTGGC | eeeeeeeeeeeeeeee | sssssssssooooss | 27061 | 27076 | 36 |
| 1212867 | CTTTCATAATGCTGGC | eeeeeeeeeeeeeeee | ssssssssoooosss | 27061 | 27076 | 36 |
| 1212863 | CTTTCATAATGCTGGC | eeeeeeeeeeeeeeee | ssssssooossssss | 27061 | 27076 | 36 |
| 1212866 | CTTTCATAATGCTGGC | eeeeeeeeeeeeeeee | ssssssoooosssss | 27061 | 27076 | 36 |
| 1212861 | CTTTCATAATGCTGGC | eeeeeeeeeeeeeeee | sssssooooosssss | 27061 | 27076 | 36 |
| 1212860 | CTTTCATAATGCTGGC | eeeeeeeeeeeeeeee | sssssoooooossss | 27061 | 27076 | 36 |
| 1212865 | CTTTCATAATGCTGGC | eeeeeeeeeeeeeeee | ssssoooosssssss | 27061 | 27076 | 36 |
| 1212859 | CTTTCATAATGCTGGC | eeeeeeeeeeeeeeee | ssssooooooossss | 27061 | 27076 | 36 |
| 1212851 | CTTTCATAATGCTGGC | eeeeeeeeeeeeeeee | sssosssosssosss | 27061 | 27076 | 36 |
| 1212850 | CTTTCATAATGCTGGC | eeeeeeeeeeeeeeee | ssosssssssssoss | 27061 | 27076 | 36 |
| 1212852 | CTTTCATAATGCTGGC | eeeeeeeeeeeeeeee | ssossossossosss | 27061 | 27076 | 36 |
| 1212853 | CTTTCATAATGCTGGC | eeeeeeeeeeeeeeee | ssossossosososs | 27061 | 27076 | 36 |
| 1212854 | CTTTCATAATGCTGGC | eeeeeeeeeeeeeeee | ssososososososs | 27061 | 27076 | 36 |
| 1212864 | CTTTCATAATGCTGGC | eeeeeeeeeeeeeeee | ssoooosssssssss | 27061 | 27076 | 36 |
| 1212855 | CTTTCATAATGCTGGC | eeeeeeeeeeeeeeee | soossssssssooss | 27061 | 27076 | 36 |
| 1212856 | CTTTCATAATGCTGGC | eeeeeeeeeeeeeeee | sooosssssssooss | 27061 | 27076 | 36 |
| 1212857 | CTTTCATAATGCTGGC | eeeeeeeeeeeeeeee | sooossssssoooss | 27061 | 27076 | 36 |
| 1212858 | CTTTCATAATGCTGGC | eeeeeeeeeeeeeeee | soooosssssoooss | 27061 | 27076 | 36 |
| 1210339 | ACTTTCATAATGCTGGC | eeeeeeeeeeeeeeeee | ssssssssssssssss | 27061 | 27077 | 37 |
| 1212849 | ACTTTCATAATGCTGGC | eeeeeeeeeeeeeeeee | ssssssssssooooss | 27061 | 27077 | 37 |
| 1212848 | ACTTTCATAATGCTGGC | eeeeeeeeeeeeeeeee | ssssssssoooossss | 27061 | 27077 | 37 |
| 1212845 | ACTTTCATAATGCTGGC | eeeeeeeeeeeeeeeee | sssssssooossssss | 27061 | 27077 | 37 |
| 1212844 | ACTTTCATAATGCTGGC | eeeeeeeeeeeeeeeee | ssssssoooossssss | 27061 | 27077 | 37 |
| 1212843 | ACTTTCATAATGCTGGC | eeeeeeeeeeeeeeeee | ssssssooooosssss | 27061 | 27077 | 37 |
| 1212842 | ACTTTCATAATGCTGGC | eeeeeeeeeeeeeeeee | sssssoooooosssss | 27061 | 27077 | 37 |
| 1212841 | ACTTTCATAATGCTGGC | eeeeeeeeeeeeeeeee | sssssooooooossss | 27061 | 27077 | 37 |
| 1212847 | ACTTTCATAATGCTGGC | eeeeeeeeeeeeeeeee | ssssoooossssssss | 27061 | 27077 | 37 |
| 1212832 | ACTTTCATAATGCTGGC | eeeeeeeeeeeeeeeee | ssossssssssssoss | 27061 | 27077 | 37 |
| 1212833 | ACTTTCATAATGCTGGC | eeeeeeeeeeeeeeeee | ssosssssossssoss | 27061 | 27077 | 37 |
| 1212834 | ACTTTCATAATGCTGGC | eeeeeeeeeeeeeeeee | ssosssosssossoss | 27061 | 27077 | 37 |
| 1212835 | ACTTTCATAATGCTGGC | eeeeeeeeeeeeeeeee | ssossossossososs | 27061 | 27077 | 37 |
| 1212836 | ACTTTCATAATGCTGGC | eeeeeeeeeeeeeeeee | ssososososososss | 27061 | 27077 | 37 |
| 1212846 | ACTTTCATAATGCTGGC | eeeeeeeeeeeeeeeee | ssoooossssssssss | 27061 | 27077 | 37 |
| 1212837 | ACTTTCATAATGCTGGC | eeeeeeeeeeeeeeeee | soosssssssssooss | 27061 | 27077 | 37 |
| 1212838 | ACTTTCATAATGCTGGC | eeeeeeeeeeeeeeeee | sooossssssssooss | 27061 | 27077 | 37 |
| 1212839 | ACTTTCATAATGCTGGC | eeeeeeeeeeeeeeeee | sooosssssssoooss | 27061 | 27077 | 37 |
| 1212840 | ACTTTCATAATGCTGGC | eeeeeeeeeeeeeeeee | soooossssssoooss | 27061 | 27077 | 37 |
| 1263814 | CACTTTCATAATGCTGGC | eeeeeeeeeeeeeeeeee | ssossssssssssssss | 27061 | 27078 | 38 |
| 1263816 | CACTTTCATAATGCTGGC | eeeeeeeeeeeeeeeeee | ssssossssssssssss | 27061 | 27078 | 38 |
| 1263818 | CACTTTCATAATGCTGGC | eeeeeeeeeeeeeeeeee | ssssssossssssssss | 27061 | 27078 | 38 |
| 1263820 | CACTTTCATAATGCTGGC | eeeeeeeeeeeeeeeeee | ssssssssossssssss | 27061 | 27078 | 38 |
| 1263822 | CACTTTCATAATGCTGGC | eeeeeeeeeeeeeeeeee | ssssssssssossssss | 27061 | 27078 | 38 |
| 1263824 | CACTTTCATAATGCTGGC | eeeeeeeeeeeeeeeeee | ssssssssssssossss | 27061 | 27078 | 38 |
| 1263826 | CACTTTCATAATGCTGGC | eeeeeeeeeeeeeeeeee | ssssssssssssssoss | 27061 | 27078 | 38 |
| 1210342 | CACTTTCATAATGCTGGC | eeeeeeeeeeeeeeeeee | ssosssssssssssoss | 27061 | 27078 | 38 |
| 1263778 | CACTTTCATAATGCTGGC | eeeeeeeeeeeeeeeeee | sossssssssssssoss | 27061 | 27078 | 38 |
| 1263781 | CACTTTCATAATGCTGGC | eeeeeeeeeeeeeeeeee | sosssssssssosssss | 27061 | 27078 | 38 |
| 1263783 | CACTTTCATAATGCTGGC | eeeeeeeeeeeeeeeeee | sosssssssosssssss | 27061 | 27078 | 38 |
| 1263785 | CACTTTCATAATGCTGGC | eeeeeeeeeeeeeeeeee | sosssssosssssssss | 27061 | 27078 | 38 |
| 1263787 | CACTTTCATAATGCTGGC | eeeeeeeeeeeeeeeeee | sosssosssssssssss | 27061 | 27078 | 38 |
| 1263789 | CACTTTCATAATGCTGGC | eeeeeeeeeeeeeeeeee | sososssssssssssss | 27061 | 27078 | 38 |
| 1263791 | CACTTTCATAATGCTGGC | eeeeeeeeeeeeeeeeee | ssssosssssssssoss | 27061 | 27078 | 38 |
| 1263793 | CACTTTCATAATGCTGGC | eeeeeeeeeeeeeeeeee | ssssssosssssssoss | 27061 | 27078 | 38 |
| 1263795 | CACTTTCATAATGCTGGC | eeeeeeeeeeeeeeeeee | ssssssssosssssoss | 27061 | 27078 | 38 |
| 1263797 | CACTTTCATAATGCTGGC | eeeeeeeeeeeeeeeeee | ssssssssssosssoss | 27061 | 27078 | 38 |
| 1263799 | CACTTTCATAATGCTGGC | eeeeeeeeeeeeeeeeee | ssssssssssssososs | 27061 | 27078 | 38 |
| 1263800 | CACTTTCATAATGCTGGC | eeeeeeeeeeeeeeeeee | soossssssssssssss | 27061 | 27078 | 38 |
| 1263802 | CACTTTCATAATGCTGGC | eeeeeeeeeeeeeeeeee | sssoossssssssssss | 27061 | 27078 | 38 |
| 1263804 | CACTTTCATAATGCTGGC | eeeeeeeeeeeeeeeeee | sssssoossssssssss | 27061 | 27078 | 38 |
| 1263806 | CACTTTCATAATGCTGGC | eeeeeeeeeeeeeeeeee | sssssssoossssssss | 27061 | 27078 | 38 |
| 1263808 | CACTTTCATAATGCTGGC | eeeeeeeeeeeeeeeeee | sssssssssoossssss | 27061 | 27078 | 38 |
| 1263810 | CACTTTCATAATGCTGGC | eeeeeeeeeeeeeeeeee | sssssssssssoossss | 27061 | 27078 | 38 |
| 1263812 | CACTTTCATAATGCTGGC | eeeeeeeeeeeeeeeeee | sssssssssssssooss | 27061 | 27078 | 38 |
| 1210343 | CACTTTCATAATGCTGGC | eeeeeeeeeeeeeeeeee | ssosssssosssssoss | 27061 | 27078 | 38 |
| 1212825 | CACTTTCATAATGCTGGC | eeeeeeeeeeeeeeeeee | sssssssooosssssss | 27061 | 27078 | 38 |
| 1212817 | CACTTTCATAATGCTGGC | eeeeeeeeeeeeeeeeee | soossssssssssooss | 27061 | 27078 | 38 |
| 1212824 | CACTTTCATAATGCTGGC | eeeeeeeeeeeeeeeeee | sssssssoooossssss | 27061 | 27078 | 38 |
| 1212826 | CACTTTCATAATGCTGGC | eeeeeeeeeeeeeeeeee | ssoooosssssssssss | 27061 | 27078 | 38 |
| 1212827 | CACTTTCATAATGCTGGC | eeeeeeeeeeeeeeeeee | ssssoooosssssssss | 27061 | 27078 | 38 |
| 1212828 | CACTTTCATAATGCTGGC | eeeeeeeeeeeeeeeeee | ssssssoooosssssss | 27061 | 27078 | 38 |
| 1212829 | CACTTTCATAATGCTGGC | eeeeeeeeeeeeeeeeee | ssssssssoooosssss | 27061 | 27078 | 38 |
| 1212830 | CACTTTCATAATGCTGGC | eeeeeeeeeeeeeeeeee | ssssssssssoooosss | 27061 | 27078 | 38 |
| 1212831 | CACTTTCATAATGCTGGC | eeeeeeeeeeeeeeeeee | sssssssssssooooss | 27061 | 27078 | 38 |
| 1212818 | CACTTTCATAATGCTGGC | eeeeeeeeeeeeeeeeee | sooosssssssssooss | 27061 | 27078 | 38 |
| 1212823 | CACTTTCATAATGCTGGC | eeeeeeeeeeeeeeeeee | ssssssooooossssss | 27061 | 27078 | 38 |
| 1212819 | CACTTTCATAATGCTGGC | eeeeeeeeeeeeeeeeee | sooossssssssoooss | 27061 | 27078 | 38 |
| 1212822 | CACTTTCATAATGCTGGC | eeeeeeeeeeeeeeeeee | ssssssoooooosssss | 27061 | 27078 | 38 |
| 1212820 | CACTTTCATAATGCTGGC | eeeeeeeeeeeeeeeeee | soooosssssssoooss | 27061 | 27078 | 38 |
| 1212821 | CACTTTCATAATGCTGGC | eeeeeeeeeeeeeeeeee | sssssooooooosssss | 27061 | 27078 | 38 |
| 1287065 | TCACTTTCATAATGCTGGC | eeeeeeeeeeeeeeeeeee | ssssssssssssssssss | 27061 | 27079 | 39 |
| 1210341 | ACTTTCATAATGCTGG | eeeeeeeeeeeeeeee | sssssssssssssss | 27062 | 27077 | 40 |
| 524403 | CACTTTCATAATGCTGG | eeeeeeeeeeeeeeeee | ssssssssssssssss | 27062 | 27078 | 41 |
| 1287121 | TCACTTTCATAATGCTGG | eeeeeeeeeeeeeeeeee | ssssssssssssssoss | 27062 | 27079 | 42 |
| 1287120 | TCACTTTCATAATGCTGG | eeeeeeeeeeeeeeeeee | sssssssssssssosss | 27062 | 27079 | 42 |
| 1287113 | TCACTTTCATAATGCTGG | eeeeeeeeeeeeeeeeee | sssssssssssssooss | 27062 | 27079 | 42 |
| 1287110 | TCACTTTCATAATGCTGG | eeeeeeeeeeeeeeeeee | ssssssssssssososs | 27062 | 27079 | 42 |
| 1287119 | TCACTTTCATAATGCTGG | eeeeeeeeeeeeeeeeee | sssssssssssosssss | 27062 | 27079 | 42 |
| 1364782 | TCACTTTCATAATGCTGG | eeeeeeeeeeeeeeeeee | sssssssssssososss | 27062 | 27079 | 42 |
| 1364777 | TCACTTTCATAATGCTGG | eeeeeeeeeeeeeeeeee | ssssssssssossosss | 27062 | 27079 | 42 |
| 1287118 | TCACTTTCATAATGCTGG | eeeeeeeeeeeeeeeeee | sssssssssosssssss | 27062 | 27079 | 42 |
| 1364783 | TCACTTTCATAATGCTGG | eeeeeeeeeeeeeeeeee | sssssssssosssosss | 27062 | 27079 | 42 |
| 1287109 | TCACTTTCATAATGCTGG | eeeeeeeeeeeeeeeeee | ssssssssosssssoss | 27062 | 27079 | 42 |
| 1364784 | TCACTTTCATAATGCTGG | eeeeeeeeeeeeeeeeee | ssssssssossssosss | 27062 | 27079 | 42 |
| 1287117 | TCACTTTCATAATGCTGG | eeeeeeeeeeeeeeeeee | sssssssosssssssss | 27062 | 27079 | 42 |
| 1287112 | TCACTTTCATAATGCTGG | eeeeeeeeeeeeeeeeee | sssssssoossssssss | 27062 | 27079 | 42 |
| 1287116 | TCACTTTCATAATGCTGG | eeeeeeeeeeeeeeeeee | sssssosssssssssss | 27062 | 27079 | 42 |
| 1287115 | TCACTTTCATAATGCTGG | eeeeeeeeeeeeeeeeee | sssosssssssssssss | 27062 | 27079 | 42 |
| 1287114 | TCACTTTCATAATGCTGG | eeeeeeeeeeeeeeeeee | sosssssssssssssss | 27062 | 27079 | 42 |
| 1287106 | TCACTTTCATAATGCTGG | eeeeeeeeeeeeeeeeee | sossssssssssssoss | 27062 | 27079 | 42 |
| 1287107 | TCACTTTCATAATGCTGG | eeeeeeeeeeeeeeeeee | sossssssossssssss | 27062 | 27079 | 42 |
| 1287108 | TCACTTTCATAATGCTGG | eeeeeeeeeeeeeeeeee | sososssssssssssss | 27062 | 27079 | 42 |
| 1287111 | TCACTTTCATAATGCTGG | eeeeeeeeeeeeeeeeee | soossssssssssssss | 27062 | 27079 | 42 |
| 1287066 | TTCACTTTCATAATGCTGG | eeeeeeeeeeeeeeeeeee | ssssssssssssssssss | 27062 | 27080 | 43 |
| 1287074 | TTCACTTTCATAATGCTGG | eeeeeeeeeeeeeeeeeee | sssssssssssssssoss | 27062 | 27080 | 43 |
| 1287071 | TTCACTTTCATAATGCTGG | eeeeeeeeeeeeeeeeeee | sssssssssssssososs | 27062 | 27080 | 43 |
| 1287073 | TTCACTTTCATAATGCTGG | eeeeeeeeeeeeeeeeeee | ssssssssosssssssss | 27062 | 27080 | 43 |
| 1287070 | TTCACTTTCATAATGCTGG | eeeeeeeeeeeeeeeeeee | ssssssssossssssoss | 27062 | 27080 | 43 |
| 1287072 | TTCACTTTCATAATGCTGG | eeeeeeeeeeeeeeeeeee | sossssssssssssssss | 27062 | 27080 | 43 |
| 1287067 | TTCACTTTCATAATGCTGG | eeeeeeeeeeeeeeeeeee | sosssssssssssssoss | 27062 | 27080 | 43 |
| 1287068 | TTCACTTTCATAATGCTGG | eeeeeeeeeeeeeeeeeee | sossssssosssssssss | 27062 | 27080 | 43 |
| 1287069 | TTCACTTTCATAATGCTGG | eeeeeeeeeeeeeeeeeee | sosossssssssssssss | 27062 | 27080 | 43 |
| 1287060 | ATTCACTTTCATAATGCTGG | eeeeeeeeeeeeeeeeeeee | ssssssssssssssssoss | 27062 | 27081 | 45 |
| 1287057 | ATTCACTTTCATAATGCTGG | eeeeeeeeeeeeeeeeeeee | sssssssssssssssooss | 27062 | 27081 | 45 |
| 1287054 | ATTCACTTTCATAATGCTGG | eeeeeeeeeeeeeeeeeeee | ssssssssssssssososs | 27062 | 27081 | 45 |
| 1287059 | ATTCACTTTCATAATGCTGG | eeeeeeeeeeeeeeeeeeee | sssssssssosssssssss | 27062 | 27081 | 45 |
| 1287053 | ATTCACTTTCATAATGCTGG | eeeeeeeeeeeeeeeeeeee | sssssssssossssssoss | 27062 | 27081 | 45 |
| 1287056 | ATTCACTTTCATAATGCTGG | eeeeeeeeeeeeeeeeeeee | ssssssssoosssssssss | 27062 | 27081 | 45 |
| 1287058 | ATTCACTTTCATAATGCTGG | eeeeeeeeeeeeeeeeeeee | sosssssssssssssssss | 27062 | 27081 | 45 |
| 1287050 | ATTCACTTTCATAATGCTGG | eeeeeeeeeeeeeeeeeeee | sossssssssssssssoss | 27062 | 27081 | 45 |
| 1287051 | ATTCACTTTCATAATGCTGG | eeeeeeeeeeeeeeeeeeee | sosssssssosssssssss | 27062 | 27081 | 45 |
| 1287052 | ATTCACTTTCATAATGCTGG | eeeeeeeeeeeeeeeeeeee | sososssssssssssssss | 27062 | 27081 | 45 |
| 1287055 | ATTCACTTTCATAATGCTGG | eeeeeeeeeeeeeeeeeeee | soossssssssssssssss | 27062 | 27081 | 45 |
| 1287075 | ATTCACTTTCATAATGCTG | eeeeeeeeeeeeeeeeeee | ssssssssssssssssss | 27063 | 27081 | 46 |
| 1287062 | AGATTCACTTTCATAATGCT | eeeeeeeeeeeeeeeeeeee | sssssssssssssssssss | 27064 | 27083 | 47 |
| 1287061 | GATTCACTTTCATAATGCTG | eeeeeeeeeeeeeeeeeeee | sssssssssssssssssss | 27063 | 27082 | 48 |
| 1287076 | GATTCACTTTCATAATGCT | eeeeeeeeeeeeeeeeeee | ssssssssssssssssss | 27064 | 27082 | 49 |
| 1287701 | TCACTTTCATAATGCTGGT | eeeeeeeeeeeeeeeeeee | ssssssssssssssssss | 27062 | 27079 | 50 |
| 1287702 | TCACTTTCATAATGCTGGA | eeeeeeeeeeeeeeeeeee | ssssssssssssssssss | 27062 | 27079 | 51 |

### Table 2

[0206] The modified oligonucleotides in Table 2 below are 16, 17, 18, 19 or 20 nucleosides in length. Each nucleoside comprises a 2′-NMA sugar moiety. The sugar motif for each modified oligonucleotide is provided in the Sugar Motif column, wherein each ‘n’ represents a 2′-NMA sugar moiety. Each intemnucleoside linkage is either a phosphorothioate intemnucleoside linkage or a phosphodiester intemnucleoside linkage. The intemnucleoside linkage motif for each modified oligonucleotide is provided in the Intermucleoside Linkage Motif column, wherein each ‘s’ represents a phosphorothioate intemnucleoside linkage, and each ‘o’ reprmsents a phosphodiester intemnucleoside linkage. Each cytosine is a 5-methyl cytosine.

[0207] Each modified oligonucleotide listed in Table 2 below is 100% complementary to SEQ ID NO: 1 (GENBANK Acession No. NT_006713.14 truncated from nucleotides 19939708 to 19967777). “Start site” indicates the 5′-most nucleoside to which the modified oligonucleotide is complementary in the target nucleic acid sequence. “Stop site” indicates the 3′-most nucleoside to which the modified oligonucleotide is complementary in the target nucleic acid sequence.

TABLE 2
2′-NMA modified oligonucleotides with PS or mixed PS/PO
internucleoside linkages

| | | | Inter- | | | |
|---|---|---|---|---|---|---|
| | | | nucleo- | SEQ | SEQ | |
| | Nucleo- | | side | ID | ID | |
| | base | Sugar | Linkage | No: | No: | |
| | Sequence | Motif | Motif | 1 | 1 | SEQ |
| Compound | (5′ to | (5′ to | (5′ to | Start | Stop | ID |
| Number | 3′) | 3′) | 3′) | Site | Site | No. |
| 1287127 | CACTTTC | nnnnnnn | sssssss | 27060 | 27078 | 34 |
| | ATAATGC | nnnnnnn | sssssss | | | |
| | TGGCA | nnnnn | ssss | | | |
| 1287122 | TCACTTT | nnnnnnn | sssssss | 27060 | 27079 | 35 |
| | CATAATG | nnnnnnn | sssssss | | | |
| | CTGGCA | nnnnnn | sssss | | | |
| 1212871 | CTTTCAT | nnnnnnn | sssssss | 27061 | 27076 | 36 |
| | AATGCTG | nnnnnnn | sssssss | | | |
| | GC | nn | s | | | |
| 1212869 | ACTTTCA | nnnnnnn | sssssss | 27061 | 27077 | 37 |
| | TAATGCT | nnnnnnn | sssssss | | | |
| | GGC | nnn | ss | | | |
| 1358996 | CACTTTC | nnnnnnn | sososss | 27061 | 27078 | 38 |
| | ATAATGC | nnnnnnn | sssssss | | | |
| | TGGC | nn | sss | | | |
| 1212873 | CACTTTC | nnnnnnn | ssossss | 27061 | 27078 | 38 |
| | ATAATGC | nnnnnnn | sssssss | | | |
| | TGGC | nnn | oss | | | |
| 1212874 | CACTTTC | nnnnnnn | ssossss | 27061 | 27078 | 38 |
| | ATAATGC | nnnnnnn | sosssss | | | |
| | TGGC | nn | oss | | | |
| 1212875 | CACTTTC | nnnnnnn | ssossso | 27061 | 27078 | 38 |
| | ATAATGC | nnnnnnn | sssosss | | | |
| | TGGC | nnn | oss | | | |
| 1212879 | CACTTTC | nnnnnnn | soossss | 27061 | 27078 | 38 |
| | ATAATGC | nnnnnnn | sssssso | | | |
| | TGGC | nnn | oss | | | |
| 1212880 | CACTTTC | nnnnnnn | sooosss | 27061 | 27078 | 38 |
| | ATAATGC | nnnnnnn | sssssso | | | |
| | TGGC | nnn | oss | | | |
| 1212881 | CACTTTC | nnnnnnn | sooosss | 27061 | 27078 | 38 |
| | ATAATGC | nnnnnnn | sssssoo | | | |
| | TGGC | nnnn | oss | | | |
| 1212885 | CACTTTC | nnnnnnn | sssssso | 27061 | 27078 | 38 |
| | ATAATGC | nnnnnnn | oooosss | | | |
| | TGGC | nnnn | sss | | | |
| 1212887 | CACTTTC | nnnnnnn | sssssss | 27061 | 27078 | 38 |
| | ATAATGC | nnnnnnn | ooossss | | | |
| | TGGC | nnnn | sss | | | |
| 1287128 | TCACTTT | nnnnnnn | sssssss | 27061 | 27079 | 39 |
| | CATAATG | nnnnnnn | sssssss | | | |
| | CTGGC | nnnnn | ssss | | | |
| 1212870 | CACTTTC | nnnnnnn | sssssss | 27062 | 27078 | 41 |
| | ATAATGC | nnnnnnn | sssssss | | | |
| | TGG | nnn | ss | | | |
| 1287132 | TCACTTT | nnnnnnn | sosssss | 27062 | 27079 | 42 |
| | CATAATG | nnnnnnn | sssssss | | | |
| | CTGG | nnnn | oss | | | |
| 1287133 | TCACTTT | nnnnnnn | sssssss | 27062 | 27079 | 42 |
| | CATAATG | nnnnnnn | sosssss | | | |
| | CTGG | nnnn | sss | | | |
| 1332246 | TCACTTT | nnnnnnn | sssssss | 27062 | 27079 | 42 |
| | CATAATG | nnnnnnn | sosssss | | | |
| | CTGG | nnnn | oss | | | |
| 1332265 | TCACTTT | nnnnnnn | sssssss | 27062 | 27079 | 42 |
| | CATAATG | nnnnnnn | sssssos | | | |
| | CTGG | nnnn | oss | | | |
| 1364778 | TCACTTT | nnnnnnn | sssssss | 27062 | 27079 | 42 |
| | CATAATG | nnnnnnn | ssssoso | | | |
| | CTGG | nnnn | sss | | | |
| 1364779 | TCACTTT | nnnnnnn | sssssss | 27062 | 27079 | 42 |
| | CATAATG | nnnnnnn | sssosso | | | |
| | CTGG | nnnn | sss | | | |
| 1364780 | TCACTTT | nnnnnnn | sssssss | 27062 | 27079 | 42 |
| | CATAATG | nnnnnnn | ssossso | | | |
| | CTGG | nnnn | sss | | | |
| 1364781 | TCACTTT | nnnnnnn | sssssss | 27062 | 27079 | 42 |
| | CATAATG | nnnnnnn | sosssso | | | |
| | CTGG | nnnn | sss | | | |
| 1287129 | TTCACTT | nnnnnnn | sssssss | 27062 | 27080 | 43 |
| | TCATAAT | nnnnnnn | sssssss | | | |
| | GCTGG | nnnnn | ssss | | | |
| 1287130 | TTCACTT | nnnnnnn | sosssss | 27062 | 27080 | 43 |
| | TCATAAT | nnnnnnn | sssssss | | | |
| | GCTGG | nnnnn | soss | | | |
| 1287131 | TTCACTT | nnnnnnn | sssssss | 27062 | 27080 | 43 |
| | TCATAAT | nnnnnnn | sosssss | | | |
| | GCTGG | nnnnn | ssss | | | |
| 1332263 | TTCACTT | nnnnnnn | sssssss | 27062 | 27080 | 43 |
| | TCATAAT | nnnnnnn | sosssss | | | |
| | GCTGG | nnnnn | soss | | | |
| 1332264 | TTCACTT | nnnnnnn | sssssss | 27062 | 27080 | 43 |
| | TCATAAT | nnnnnnn | sssssss | | | |
| | GCTGG | nnnnn | soss | | | |
| 1332266 | TTCACTT | nnnnnnn | sssssss | 27062 | 27080 | 43 |
| | TCATAAT | nnnnnnn | sssssso | | | |
| | GCTGG | nnnnn | soss | | | |
| 1332270 | TTCACTT | nnnnnnn | sssssss | 27062 | 27080 | 43 |
| | TCATAAT | nnnnnnn | sssssss | | | |
| | GCTGG | nnnnn | ooss | | | |
| 1287124 | ATTCACT | nnnnnnn | sssssss | 27062 | 27081 | 45 |
| | TTCATAA | nnnnnnn | sssssss | | | |
| | TGCTGG | nnnnnn | sssss | | | |
| 1287125 | ATTCACT | nnnnnnn | sosssss | 27062 | 27081 | 45 |
| | TTCATAA | nnnnnnn | sssssss | | | |
| | TGCTGG | nnnnnn | ssoss | | | |
| 1287126 | ATTCACT | nnnnnnn | sssssss | 27062 | 27081 | 45 |
| | TTCATAA | nnnnnnn | ssossss | | | |
| | TGCTGG | nnnnnn | sssss | | | |
| 1332267 | ATTCACT | nnnnnnn | sssssss | 27062 | 27081 | 45 |
| | TTCATAA | nnnnnnn | sssssss | | | |
| | TGCTGG | nnnnnn | ssoss | | | |
| 1332268 | ATTCACT | nnnnnnn | sssssss | 27062 | 27081 | 45 |
| | TTCATAA | nnnnnnn | sssssss | | | |
| | TGCTGG | nnnnnn | sooss | | | |
| 1332269 | ATTCACT | nnnnnnn | sssssss | 27062 | 27081 | 45 |
| | TTCATAA | nnnnnnn | sssssss | | | |
| | TGCTGG | nnnnnn | ososs | | | |
| 1332271 | ATTCACT | nnnnnnn | sssssss | 27062 | 27081 | 45 |
| | TTCATAA | nnnnnnn | ssossss | | | |
| | TGCTGG | nnnnnn | ssoss | | | |
| 1287123 | TTCACTT | nnnnnnn | sssssss | 27061 | 27080 | 52 |
| | TCATAAT | nnnnnnn | sssssss | | | |
| | GCTGGC | nnnnnn | sssss | | | |

### Table 3

[0208] The modified oligonucleotides in Table 3 below are 18 or 19 nucleosides in length. Each nucleoside comprises either a 2′-MOE sugar moiety or a 2′-NMA sugar moiety. The sugar motif for each modified oligonucleotide is provided in the Sugar Motif column, wherein each ‘e’ represents a 2′-MOE sugar moiety, and each ‘n’ represents a 2′-NMA sugar moiety. Each intermucleoside linkage is a phosphorothioate intermucleoside linkage. The intermucleoside linkage motif for each modified oligonucleotide is provided in the Internucleoside Linkage Motif column, wherein each ‘s’ represents a phosphorothioate internucleoside linkage. Each cytosine is a 5-methyl cytosine.

[0209] Each modified oligonucleotide listed in Table 3 below is 100% complementary to SEQ ID NO: 1 (GENBANK Acession No. NT_006713.14 truncated from nucleotides 19939708 to 19967777), unless specifically stated otherwise. Non-complementary nucleobases are specified in the Nucleobase Sequence column in underlined, bold, italicized font. “Start site” indicates the 5′-most nucleoside to which the modified oligonucleotide is complementary in the target nucleic acid sequence. “Stop site” indicates the 3′-most nucleoside to which the modified oligonucleotide is complementary in the target nucleic acid sequence.

TABLE 3
Mixed 2′-MOE/2′-NMA modified oligonucleotides
with PS internucleoside linkages

| | | | Inter- | | | |
|---|---|---|---|---|---|---|
| | | | nucleo- | SEQ | SEQ | |
| | Nucleo- | | side | ID | ID | |
| | base | Sugar | Linkage | No: | No: | |
| | Sequence | Motif | Motif | 1 | 1 | SEQ |
| Compound | (5′ to | (5′ to | (5′ to | Start | Stop | ID |
| Number | 3′) | 3′) | 3′) | Site | Site | No. |
| 1212931 | CACTTTC | nennnnn | sssssss | 27061 | 27078 | 38 |
| | ATAATGC | eneennn | sssssss | | | |
| | TGGC | nnnn | sss | | | |
| 1212936 | CACTTTC | nnnnnnn | sssssss | 27061 | 27078 | 38 |
| | ATAATGC | nnnnnen | sssssss | | | |
| | TGGC | neen | sss | | | |
| 1212941 | CACTTTC | nennnnn | sssssss | 27061 | 27078 | 38 |
| | ATAATGC | eneenen | sssssss | | | |
| | TGGC | neen | sss | | | |
| 1287728 | TCACTTT | nnnnnnn | sssssss | 27061 | 27079 | 39 |
| | CATAATG | nnnnnnn | sssssss | | | |
| | CTGGC | nnnne | ssss | | | |
| 1287729 | TCACTTT | nnnnnnn | sssssss | 27062 | 27079 | 50 |
| | CATAATG | nnnnnnn | sssssss | | | |
| | CTGGT | nnnne | ssss | | | |
| 1287730 | TCACTTT | nnnnnnn | sssssss | 27062 | 27079 | 51 |
| | CATAATG | nnnnnnn | sssssss | | | |
| | CTGGA | nnnne | ssss | | | |

### Table 4

[0210] The modified oligonucleotides in Table 4 below are 16, 17, or 18 nucleosides in length. Each nucleoside comprises either a 2′-MOE sugar moiety or a cEt sugar moiety. The sugar motif for each modified oligonucleotide is provided in the Sugar Motif column, wherein each ‘e’ represents a 2′-MOE sugar moiety, and each ‘k’ represents a cEt sugar moiety. Each internucleoside linkage is a phosphorothioate internucleoside linkage. The internucleoside linkage motif for each modified oligonucleotide is provided in the Internucleoside Linkage Motif column, wherein each ‘s’ represents a phosphorothioate internucleoside linkage. Each cytosine is a 5-methyl cytosine.

[0211] Each modified oligonucleotide listed in Table 4 below is 100% complementary to SEQ ID NO: 1 (GENBANK Acession No. NT_006713.14 truncated from nucleotides 19939708 to 19967777). “Start site” indicates the 5′-most nucleoside to which the modified oligonucleotide is complementary in the target nucleic acid sequence. “Stop site” indicates the 3′-most nucleoside to which the modified oligonucleotide is complementary in the target nucleic acid sequence.

TABLE 4
Mixed 2′-MOE/cEt modified oligonucleotides with PS
internucleoside linkages

| | | | Inter- | | | |
|---|---|---|---|---|---|---|
| | | | nucleo- | SEQ | SEQ | |
| | Nucleo- | | side | ID | ID | |
| | base | Sugar | Linkage | No: | No: | |
| | Sequence | Motif | Motif | 1 | 1 | SEQ |
| Compound | (5′ to | (5′ to | (5′ to | Start | Stop | ID |
| Number | 3′) | 3′) | 3′) | Site | Site | No. |
| 1212961 | CACTTTC | keekeek | sssssss | 27061 | 27078 | 38 |
| | ATAATGC | eekeeke | sssssss | | | |
| | TGGC | eeek | sss | | | |
| 1212962 | CACTTTC | keeekee | sssssss | 27061 | 27078 | 38 |
| | ATAATGC | ekeeeke | sssssss | | | |
| | TGGC | eeek | sss | | | |
| 1212963 | CACTTTC | keeeeek | sssssss | 27061 | 27078 | 38 |
| | ATAATGC | eeeeeke | sssssss | | | |
| | TGGC | eeek | sss | | | |
| 1212964 | CACTTTC | keeeeee | sssssss | 27061 | 27078 | 38 |
| | ATAATGC | ekeeeee | sssssss | | | |
| | TGGC | eeek | sss | | | |
| 1212965 | CACTTTC | keeeeee | sssssss | 27061 | 27078 | 38 |
| | ATAATGC | eeeeeee | sssssss | | | |
| | TGGC | eeek | sss | | | |
| 1212966 | CACTTTC | eeekeek | sssssss | 27061 | 27078 | 38 |
| | ATAATGC | eekeeke | sssssss | | | |
| | TGGC | ekek | sss | | | |
| 1212967 | CACTTTC | eeekeek | sssssss | 27061 | 27078 | 38 |
| | ATAATGC | eekeeke | sssssss | | | |
| | TGGC | ekee | sss | | | |
| 1212968 | CACTTTC | eeeeeek | sssssss | 27061 | 27078 | 38 |
| | ATAATGC | eekeeke | sssssss | | | |
| | TGGC | ekee | sss | | | |
| 1212969 | CACTTTC | eeeeeek | sssssss | 27061 | 27078 | 38 |
| | ATAATGC | eekeeke | sssssss | | | |
| | TGGC | eeee | sss | | | |
| 1212970 | CACTTTC | eeeeeek | sssssss | 27061 | 27078 | 38 |
| | ATAATGC | eeeeeke | sssssss | | | |
| | TGGC | eeee | sss | | | |
| 1212971 | CACTTTC | keekeek | sssssss | 27061 | 27078 | 38 |
| | ATAATGC | eekeeee | sssssss | | | |
| | TGGC | eeee | sss | | | |
| 1212972 | CACTTTC | eeeeeee | sssssss | 27061 | 27078 | 38 |
| | ATAATGC | ekeekee | sssssss | | | |
| | TGGC | keek | sss | | | |
| 1212973 | CACTTTC | keekeek | sssssss | 27061 | 27078 | 38 |
| | ATAATGC | eeeeeee | sssssss | | | |
| | TGGC | eeee | sss | | | |
| 1212974 | CACTTTC | eeeeeee | sssssss | 27061 | 27078 | 38 |
| | ATAATGC | eeeekee | sssssss | | | |
| | TGGC | keek | sss | | | |
| 1212975 | CACTTTC | keekeee | sssssss | 27061 | 27078 | 38 |
| | ATAATGC | eeeeeee | sssssss | | | |
| | TGGC | eeee | sss | | | |
| 1212976 | CACTTTC | eeeeeee | sssssss | 27061 | 27078 | 38 |
| | ATAATGC | eeeeeee | sssssss | | | |
| | TGGC | keek | sss | | | |
| 1212977 | ACTTTCA | keekeek | sssssss | 27061 | 27077 | 37 |
| | TAATGCT | eekeeke | sssssss | | | |
| | GGC | eek | ss | | | |
| 1212978 | ACTTTCA | keeekee | sssssss | 27061 | 27077 | 37 |
| | TAATGCT | ekeeeke | sssssss | | | |
| | GGC | eek | ss | | | |
| 1212979 | ACTTTCA | keeeeke | sssssss | 27061 | 27077 | 37 |
| | TAATGCT | eeeekee | sssssss | | | |
| | GGC | eek | ss | | | |
| 1212980 | ACTTTCA | keeeeee | sssssss | 27061 | 27077 | 37 |
| | TAATGCT | ekeeeee | sssssss | | | |
| | GGC | eek | ss | | | |
| 1212981 | ACTTTCA | keeeeee | sssssss | 27061 | 27077 | 37 |
| | TAATGCT | eeeeeee | sssssss | | | |
| | GGC | eek | ss | | | |
| 1212982 | ACTTTCA | eekeeke | sssssss | 27061 | 27077 | 37 |
| | TAATGCT | ekeekee | sssssss | | | |
| | GGC | kek | ss | | | |
| 1212983 | ACTTTCA | eekeeke | sssssss | 27061 | 27077 | 37 |
| | TAATGCT | ekeekee | sssssss | | | |
| | GGC | kee | ss | | | |
| 1212984 | ACTTTCA | eeeeeke | sssssss | 27061 | 27077 | 37 |
| | TAATGCT | ekeekee | sssssss | | | |
| | GGC | kee | ss | | | |
| 1212985 | ACTTTCA | eeeeeke | sssssss | 27061 | 27077 | 37 |
| | TAATGCT | ekeekee | sssssss | | | |
| | GGC | eee | ss | | | |
| 1212986 | ACTTTCA | eeeeeke | sssssss | 27061 | 27077 | 37 |
| | TAATGCT | eeeekee | sssssss | | | |
| | GGC | eee | ss | | | |
| 1212987 | ACTTTCA | keekeek | sssssss | 27061 | 27077 | 37 |
| | TAATGCT | eekeeee | sssssss | | | |
| | GGC | eee | ss | | | |
| 1212988 | ACTTTCA | eeeeeee | sssssss | 27061 | 27077 | 37 |
| | TAATGCT | keekeek | sssssss | | | |
| | GGC | eek | ss | | | |
| 1212989 | ACTTTCA | keekeek | sssssss | 27061 | 27077 | 37 |
| | TAATGCT | eeeeeee | sssssss | | | |
| | GGC | eee | ss | | | |
| 1212990 | ACTTTCA | eeeeeee | sssssss | 27061 | 27077 | 37 |
| | TAATGCT | eeekeek | sssssss | | | |
| | GGC | eek | ss | | | |
| 1212991 | ACTTTCA | keekeee | sssssss | 27061 | 27077 | 37 |
| | TAATGCT | eeeeeee | sssssss | | | |
| | GGC | eee | ss | | | |
| 1212992 | ACTTTCA | eeeeeee | sssssss | 27061 | 27077 | 37 |
| | TAATGCT | eeeeeek | sssssss | | | |
| | GGC | eek | ss | | | |
| 1212993 | CTTTCAT | keekeek | sssssss | 27061 | 27076 | 36 |
| | AATGCTG | eekeeke | sssssss | | | |
| | GC | ek | s | | | |
| 1212994 | CTTTCAT | keeekee | sssssss | 27061 | 27076 | 36 |
| | AATGCTG | ekeeeke | sssssss | | | |
| | GC | ek | s | | | |
| 1212995 | CTTTCAT | keeeeke | sssssss | 27061 | 27076 | 36 |
| | AATGCTG | eeekeee | sssssss | | | |
| | GC | ek | s | | | |
| 1212996 | CTTTCAT | keeeeee | sssssss | 27061 | 27076 | 36 |
| | AATGCTG | ekeeeee | sssssss | | | |
| | GC | ek | s | | | |
| 1212997 | CTTTCAT | keeeeee | sssssss | 27061 | 27076 | 36 |
| | AATGCTG | eeeeeee | sssssss | | | |
| | GC | ek | s | | | |
| 1212998 | CTTTCAT | kekeeke | sssssss | 27061 | 27076 | 36 |
| | AATGCTG | ekeekee | sssssss | | | |
| | GC | ke | s | | | |
| 1212999 | CTTTCAT | eekeeke | sssssss | 27061 | 27076 | 36 |
| | AATGCTG | ekeekee | sssssss | | | |
| | GC | ke | s | | | |
| 1213000 | CTTTCAT | eeeeeke | sssssss | 27061 | 27076 | 36 |
| | AATGCTG | ekeekee | sssssss | | | |
| | GC | ke | s | | | |
| 1213001 | CTTTCAT | eeeeeke | sssssss | 27061 | 27076 | 36 |
| | AATGCTG | ekeekee | sssssss | | | |
| | GC | ee | s | | | |
| 1213002 | CTTTCAT | eeeeeke | sssssss | 27061 | 27076 | 36 |
| | AATGCTG | eeeekee | sssssss | | | |
| | GC | ee | s | | | |
| 1213003 | CTTTCAT | keekeek | sssssss | 27061 | 27076 | 36 |
| | AATGCTG | eekeeee | sssssss | | | |
| | GC | ee | s | | | |
| 1213004 | CTTTCAT | eeeeeek | sssssss | 27061 | 27076 | 36 |
| | AATGCTG | eekeeke | sssssss | | | |
| | GC | ek | s | | | |
| 1213005 | CTTTCAT | keekeek | sssssss | 27061 | 27076 | 36 |
| | AATGCTG | eeeeeee | sssssss | | | |
| | GC | ee | s | | | |
| 1213006 | CTTTCAT | eeeeeee | sssssss | 27061 | 27076 | 36 |
| | AATGCTG | eekeeke | sssssss | | | |
| | GC | ek | s | | | |
| 1213007 | CTTTCAT | keekeee | sssssss | 27061 | 27076 | 36 |
| | AATGCTG | eeeeeee | sssssss | | | |
| | GC | ee | s | | | |
| 1213008 | CTTTCAT | eeeeeee | sssssss | 27061 | 27076 | 36 |
| | AATGCTG | eeeeeke | sssssss | | | |
| | GC | ek | s | | | |

### Table 5

[0212] The modified oligonucleotides in Table 5 below are 19 or 20 nucleosides in length. Each nucleoside comprises a 2′-MOE sugar moiety, a 2′-NMA sugar moiety, a 2′-OMe sugar moiety, or a 2′-β-D-deoxyribosyl sugar moiety. The sugar motif for each modified oligonucleotide is provided in the Sugar Motif column, wherein each ‘e’ represents a 2′-MOE sugar moiety, each ‘n’ represents a 2′-NMA sugar moiety, each ‘y’ represents a 2′-OMe sugar moiety, and each ‘d’ represents a 2′-β-D-deoxyribosyl sugar moiety. Each intermucleoside linkage is either a phosphorothioate intermucleoside linkage or a phosphodiester intermucleoside linkage. The intermucleoside linkage motif for each modified oligonucleotide, provided in the Intermucleoside Linkage Motif column, is (from 5′ to 3′): ssssssssssssssssso; wherein each ‘s’ represents a phosphorothioate intermucleoside linkage, and each ‘o’ represents a phosphodiester intermucleoside linkage. Cytosines are either non-methylated cytosines or 5-methyl cytosines, wherein each lowercase ‘c’ in the Nucleobase Sequence column represents a non-methylated cytosine, and each uppercase ‘C’ in the Nucleobase Sequence column represents a 5-methyl cytosine.

[0213] Each nucleobase in the modified oligonucleotides listed in Table 5 below is complementary to SEQ ID NO: 1 (GENBANK Acession No. NT_006713.14 truncated from nucleotides 19939708 to 19967777), unless specifically stated otherwise. Non-complementary nucleobases are specified in the Nucleobase Sequence column in underlined, bold, italicized font. “Start site” indicates the 5′-most nucleoside to which the modified oligonucleotide is complementary in the target nucleic acid sequence. “Stop site” indicates the 3′-most nucleoside to which the modified oligonucleotide is complementary in the target nucleic acid sequence.

TABLE 5
Modified oligonucleotides with mixed
PS/PO internucleoside linkages

| | | | Inter- | | | |
|---|---|---|---|---|---|---|
| | | | nucleo- | SEQ | SEQ | |
| | Nucleo- | | side | ID | ID | |
| | base | Sugar | Linkage | No: | No: | |
| | Sequence | Motif | Motif | 1 | 1 | SEQ |
| Compound | (5′ to | (5′ to | (5′ to | Start | Stop | ID |
| Number | 3′) | 3′) | 3′) | Site | Site | No. |
| 1287707 | TCACTTT | eeeeeee | sssssss | 27061 | 27079 | 39 |
| | CATAATG | eeeeeee | sssssss | | | |
| | CTGGC | eeeed | ssso | | | |
| 1287708 | TCACTTT | eeeeeee | sssssss | 27061 | 27079 | 39 |
| | CATAATG | eeeeeee | sssssss | | | |
| | CTGGc | eeeed | ssso | | | |
| 1287709 | TCACTTT | eeeeeee | sssssss | 27062 | 27079 | 50 |
| | CATAATG | eeeeeee | sssssss | | | |
| | CTGGT | eeeed | ssso | | | |
| 1287710 | TCACTTT | eeeeeee | sssssss | 27062 | 27079 | 51 |
| | CATAATG | eeeeeee | sssssss | | | |
| | CTGGA | eeeed | ssso | | | |
| 1287711 | TCACTTT | eeeeeee | sssssss | 27061 | 27079 | 39 |
| | CATAATG | eeeeeee | sssssss | | | |
| | CTGGc | eeeey | ssso | | | |
| 1287712 | TCACTTT | eeeeeee | sssssss | 27062 | 27079 | 53 |
| | CATAATG | eeeeeee | sssssss | | | |
| | CTGGU | eeeey | ssso | | | |
| 1287713 | TCACTTT | eeeeeee | sssssss | 27062 | 27079 | 51 |
| | CATAATG | eeeeeee | sssssss | | | |
| | CTGGA | eeeey | ssso | | | |
| 1287731 | TCACTTT | nnnnnnn | sssssss | 27061 | 27079 | 39 |
| | CATAATG | nnnnnnn | sssssss | | | |
| | CTGGC | nnnne | ssso | | | |
| 1287732 | TCACTTT | nnnnnnn | sssssss | 27061 | 27079 | 39 |
| | CATAATG | nnnnnnn | sssssss | | | |
| | CTGGc | nnnne | ssso | | | |
| 1287733 | TCACTTT | nnnnnnn | sssssss | 27062 | 27079 | 50 |
| | CATAATG | nnnnnnn | sssssss | | | |
| | CTGGT | nnnne | ssso | | | |
| 1287734 | TCACTTT | nnnnnnn | sssssss | 27062 | 27079 | 51 |
| | CATAATG | nnnnnnn | sssssss | | | |
| | CTGGA | nnnne | ssso | | | |
| 1287735 | TCACTTT | nnnnnnn | sssssss | 27061 | 27079 | 39 |
| | CATAATG | nnnnnnn | sssssss | | | |
| | CTGGC | nnnnd | ssso | | | |
| 1287736 | TCACTTT | nnnnnnn | sssssss | 27061 | 27079 | 39 |
| | CATAATG | nnnnnnn | sssssss | | | |
| | CTGGc | nnnnd | ssso | | | |
| 1287737 | TCACTTT | nnnnnnn | sssssss | 27062 | 27079 | 50 |
| | CATAATG | nnnnnnn | sssssss | | | |
| | CTGGT | nnnnd | ssso | | | |
| 1287738 | TCACTTT | nnnnnnn | sssssss | 27062 | 27079 | 51 |
| | CATAATG | nnnnnnn | sssssss | | | |
| | CTGGA | nnnnd | ssso | | | |
| 1287739 | TCACTTT | nnnnnnn | sssssss | 27061 | 27079 | 39 |
| | CATAATG | nnnnnnn | sssssss | | | |
| | CTGGc | nnnny | ssso | | | |
| 1287740 | TCACTTT | nnnnnnn | sssssss | 27062 | 27079 | 53 |
| | CATAATG | nnnnnnn | sssssss | | | |
| | CTGGU | nnnny | ssso | | | |
| 1287741 | TCACTTT | nnnnnnn | sssssss | 27062 | 27079 | 51 |
| | CATAATG | nnnnnnn | sssssss | | | |
| | CTGGA | nnnny | ssso | | | |
| 1287705 | TCACTTT | eeeeeee | sssssss | 27062 | 27079 | 50 |
| | CATAATG | eeeeeee | sssssss | | | |
| | CTGGT | eeeee | ssso | | | |
| 1287706 | TCACTTT | eeeeeee | sssssss | 27062 | 27079 | 51 |
| | CATAATG | eeeeeee | sssssss | | | |
| | CTGGA | eeeee | ssso | | | |
| 1287704 | TCACTTT | eeeeeee | sssssss | 27061 | 27079 | 39 |
| | CATAATG | eeeeeee | sssssss | | | |
| | CTGGc | eeeee | ssso | | | |
| 1287703 | TCACTTT | eeeeeee | sssssss | 27061 | 27079 | 39 |
| | CATAATG | eeeeeee | sssssss | | | |
| | CTGGC | eeeee | ssso | | | |

### Table 6

[0214] The modified oligonucleotides in Table 6 below are 19 or 20 nucleosides in length. Each nucleoside comprises a 2′-MOE sugar moiety, a 2′-NMA sugar moiety, or a 2′-β-D-deoxyribosyl sugar moiety. The sugar motif for each modified oligonucleotide is provided in the Sugar Motif column, wherein each ‘e’ represents a 2′-MOE sugar moiety, each ‘n’ represents a 2′-NMA sugar moiety, and each ‘d’ represents a 2′-β-D-deoxyribosyl sugar moiety. Each intermucleoside linkage is either a phosphorothioate intermucleoside linkage or a phosphodiester intermucleoside linkage. The intermucleoside linkage motif for each modified oligonucleotide, provided in the Intermucleoside Linkage Motif column, is (from 5′ to 3′): sssssssssssssssssoo; wherein each ‘s’ represents a phosphorothioate intermucleoside linkage, and each ‘o’ represents a phosphodiester inteucleoside linkage. Each cytosine is a 5-methyl cytosine.

[0215] Each nucleobase in the modified oligonucleotide listed in Table 6 below is complementary to SEQ ID NO: 1 (GENBANK Acession No. NT_006713.14 truncated from nucleotides 19939708 to 19967777), unless specifically stated otherwise. Non-complementary nucleobases are specified in the Nucleobase Sequence column in underlined, bold, italicized font. “Start site” indicates the 5′-most nucleoside to which the modified oligonucleotide is complementary in the target nucleic acid sequence. “Stop site” indicates the 3′-most nucleoside to which the modified oligonucleotide is complementary in the target nucleic acid sequence.

TABLE 6
Modified oligonucleotides with mixed
PS/PO internucleoside linkages

| | | | Inter- | | | |
|---|---|---|---|---|---|---|
| | | | nucleo- | SEQ | SEQ | |
| | Nucleo- | | side | ID | ID | |
| | base | Sugar | Linkage | No: | No: | |
| | Sequence | Motif | Motif | 1 | 1 | SEQ |
| Compound | (5′ to | (5′ to | (5′ to | Start | Stop | ID |
| Number | 3′) | 3′) | 3′) | Site | Site | No. |
| 1318749 | TCACTTT | nnnnnnn | sssssss | 27062 | 27079 | 54 |
| | CATAATG | nnnnnnn | sssssss | | | |
| | CTGGAA | nnnndd | sssoo | | | |
| 1318750 | TCACTTT | nnnnnnn | sssssss | 27060 | 27079 | 35 |
| | CATAATG | nnnnnnn | sssssss | | | |
| | CTGGCA | nnnned | sssoo | | | |
| 1318751 | TCACTTT | nnnnnnn | sssssss | 27060 | 27079 | 35 |
| | CATAATG | nnnnnnn | sssssss | | | |
| | CTGGCA | nnnndd | sssoo | | | |
| 1318752 | TCACTTT | nnnnnnn | sssssss | 27062 | 27079 | 54 |
| | CATAATG | nnnnnnn | sssssss | | | |
| | CTGGAA | nnnned | sssoo | | | |
| 1318753 | TCACTTT | nnnnnnn | sssssss | 27062 | 27079 | 54 |
| | CATAATG | nnnnnnn | sssssss | | | |
| | CTGGAA | nnnnde | sssoo | | | |
| 1318754 | TCACTTT | nnnnnnn | sssssss | 27060 | 27079 | 35 |
| | CATAATG | nnnnnnn | sssssss | | | |
| | CTGGCA | nnnnde | sssoo | | | |
| 1318755 | TCACTTT | nnnnnnn | sssssss | 27062 | 27079 | 54 |
| | CATAATG | nnnnnnn | sssssss | | | |
| | CTGGAA | nnnnee | sssoo | | | |
| 1318756 | TCACTTT | nnnnnnn | sssssss | 27060 | 27079 | 35 |
| | CATAATG | nnnnnnn | sssssss | | | |
| | CTGGCA | nnnnee | sssoo | | | |
| 1318757 | TCACTTT | eeeeeee | sssssss | 27062 | 27079 | 55 |
| | CATAATG | eeeeeee | sssssss | | | |
| | CTGGAT | eeeedd | sssoo | | | |
| 1318758 | TCACTTT | eeeeeee | sssssss | 27062 | 27079 | 56 |
| | CATAATG | eeeeeee | sssssss | | | |
| | CTGGAC | eeeedd | sssoo | | | |
| 1318759 | TCACTTT | eeeeeee | sssssss | 27062 | 27079 | 57 |
| | CATAATG | eeeeeee | sssssss | | | |
| | CTGGTC | eeeedd | sssoo | | | |
| 1318760 | TCACTTT | eeeeeee | sssssss | 27062 | 27079 | 54 |
| | CATAATG | eeeeeee | sssssss | | | |
| | CTGGAA | eeeedd | sssoo | | | |
| 1318761 | TCACTTT | eeeeeee | sssssss | 27062 | 27079 | 58 |
| | CATAATG | eeeeeee | sssssss | | | |
| | CTGGTT | eeeedd | sssoo | | | |
| 1318762 | TCACTTT | eeeeeee | sssssss | 27062 | 27079 | 59 |
| | CATAATG | eeeeeee | sssssss | | | |
| | CTGGATA | eeeedd | sssoo | | | |
| 1318763 | TCACTTT | eeeeeee | sssssss | 27061 | 27079 | 60 |
| | CATAATG | eeeeeee | sssssss | | | |
| | CTGGCC | eeeedd | sssoo | | | |
| 1318764 | TCACTTT | eeeeeee | sssssss | 27062 | 27079 | 54 |
| | CATAATG | eeeeeee | sssssss | | | |
| | CTGGAA | eeeeed | sssoo | | | |
| 1318765 | TCACTTT | eeeeeee | sssssss | 27062 | 27079 | 56 |
| | CATAATG | eeeeeee | sssssss | | | |
| | CTGGAC | eeeede | sssoo | | | |
| 1318766 | TCACTTT | eeeeeee | sssssss | 27061 | 27079 | 61 |
| | CATAATG | eeeeeee | sssssss | | | |
| | CTGGCT | eeeedd | sssoo | | | |
| 1318767 | TCACTTT | eeeeeee | sssssss | 27062 | 27079 | 58 |
| | CATAATG | eeeeeee | sssssss | | | |
| | CTGGTT | eeeede | sssoo | | | |
| 1318768 | TCACTTT | eeeeeee | sssssss | 27060 | 27079 | 35 |
| | CATAATG | eeeeeee | sssssss | | | |
| | CTGGCA | eeeedd | sssoo | | | |
| 1318769 | TCACTTT | eeeeeee | sssssss | 27060 | 27079 | 35 |
| | CATAATG | eeeeeee | sssssss | | | |
| | CTGGCA | eeeeed | sssoo | | | |
| 1318770 | TCACTTT | eeeeeee | sssssss | 27062 | 27079 | 55 |
| | CATAATG | eeeeeee | sssssss | | | |
| | CTGGAT | eeeede | sssoo | | | |
| 1318771 | TCACTTT | eeeeeee | sssssss | 27062 | 27079 | 59 |
| | CATAATG | eeeeeee | sssssss | | | |
| | CTGGTA | eeeede | sssoo | | | |
| 1318772 | TCACTTT | eeeeeee | sssssss | 27062 | 27079 | 54 |
| | CATAATG | eeeeeee | sssssss | | | |
| | CTGGAA | eeeede | sssoo | | | |
| 1318773 | TCACTTT | eeeeeee | sssssss | 27062 | 27079 | 57 |
| | CATAATG | eeeeeee | sssssss | | | |
| | CTGGTC | eeeede | sssoo | | | |
| 1318774 | TCACTTT | eeeeeee | sssssss | 27061 | 27079 | 60 |
| | CATAATG | eeeeeee | sssssss | | | |
| | CTGGCC | eeeede | sssoo | | | |
| 1318775 | TCACTTT | eeeeeee | sssssss | 27061 | 27079 | 61 |
| | CATAATG | eeeeeee | sssssss | | | |
| | CTGGCT | eeeede | sssoo | | | |
| 1318776 | TCACTTT | eeeeeee | sssssss | 27060 | 27079 | 35 |
| | CATAATG | eeeeeee | sssssss | | | |
| | CTGGCA | eeeede | sssoo | | | |
| 1333508 | TCACTTT | nnnnnnn | sssssss | 27061 | 27079 | 61 |
| | CATAATG | nnnnnnn | sssssss | | | |
| | CTGGCT | nnnnee | sssoo | | | |
| 1318777 | TCACTTT | eeeeeee | sssssss | 27062 | 27079 | 56 |
| | CATAATG | eeeeeee | sssssss | | | |
| | CTGGAC | eeeeee | sssoo | | | |
| 1318778 | TCACTTT | eeeeeee | sssssss | 27062 | 27079 | 58 |
| | CATAATG | eeeeeee | sssssss | | | |
| | CTGGTT | eeeeee | sssoo | | | |
| 1318779 | TCACTTT | eeeeeee | sssssss | 27062 | 27079 | 54 |
| | CATAATG | eeeeeee | sssssss | | | |
| | CTGGAA | eeeeee | sssoo | | | |
| 1318780 | TCACTTT | eeeeeee | sssssss | 27062 | 27079 | 57 |
| | CATAATG | eeeeeee | sssssss | | | |
| | CTGGTC | eeeeee | sssoo | | | |
| 1318781 | TCACTTT | eeeeeee | sssssss | 27062 | 27079 | 55 |
| | CATAATG | eeeeeee | sssssss | | | |
| | CTGGAT | eeeeee | sssoo | | | |
| 1318782 | TCACTTT | eeeeeee | sssssss | 27061 | 27079 | 61 |
| | CATAATG | eeeeeee | sssssss | | | |
| | CTGGCT | eeeeee | sssoo | | | |
| 1318783 | TCACTTT | eeeeeee | sssssss | 27062 | 27079 | 59 |
| | CATAATG | eeeeeee | sssssss | | | |
| | CTGGTA | eeeeee | sssoo | | | |
| 1318784 | TCACTTT | eeeeeee | sssssss | 27061 | 27079 | 60 |
| | CATAATG | eeeeeee | sssssss | | | |
| | CTGGCC | eeeeee | sssoo | | | |
| 1318748 | TCACTTT | eeeeeee | sssssss | 27060 | 27079 | 35 |
| | CATAATG | eeeeeee | sssssss | | | |
| | CTGGCA | eeeeee | sssoo | | | |

### Table 7

[0216] The modified oligonucleotides in Table 7 below are each 19 nucleosides in length. Each nucleoside comprises a 2′-MOE sugar moiety, a 2′-NMA sugar moiety, or a 2′-β-D-deoxyribosyl sugar moiety. The sugar motif for each modified oligonucleotide is provided in the Sugar Motif column, wherein each ‘e’ represents a 2′-MOE sugar moiety, each ‘n’ represents a 2′-NMA sugar moiety, and each ‘d’ represents a 2′-β-D-deoxyribosyl sugar moiety. Each intermucleoside linkage is either a phosphorothioate intermucleoside linkage or a phosphodiester intermucleoside linkage. The intermucleoside linkage motif for each modified oligonucleotide, provided in the Intermucleoside Linkage Motif column, is (from 5′ to 3′): ssssssssssssososso; wherein each ‘s’ represents a phosphorothioate intermucleoside linkage, and each ‘o’ represents a phosphodiester intermucleoside linkage. Each cytosine is a 5-methyl cytosine.

[0217] Each nucleobase in the modified oligonucleotide listed in Table 7 below is complementary to SEQ ID NO: 1 (GENBANK Acession No. NT_006713.14 truncated from nucleotides 19939708 to 19967777), unless specifically stated otherwise. Non-complementary nucleobases are specified in the Nucleobase Sequence column in underlined, bold, italicized font. “Start site” indicates the 5′-most nucleoside to which the modified oligonucleotide is complementary in the target nucleic acid sequence. “Stop site” indicates the 3′-most nucleoside to which the modified oligonucleotide is complementary in the target nucleic acid sequence.

TABLE 7
Modified oligonucleotides with mixed
PS/PO internucleoside linkages

| | | | Inter- | | | |
|---|---|---|---|---|---|---|
| | Nucleo- | | nucleo- | SEQ | SEQ | |
| | base | | side | ID | ID | |
| | Se- | Sugar | Linkage | No: | No: | |
| | quence | Motif | Motif | 1 | 1 | SEQ |
| Compound | (5′ to | (5′ to | (5′ to | Start | Stop | ID |
| Number | 3′) | 3′) | 3′) | Site | Site | No. |
| 1332247 | TCACTTT | nnnnnnn | sssssss | 27061 | 27079 | 39 |
| | CATAATG | nnnnnnn | sssssos | | | |
| | CTGGC | nnnnd | osso | | | |
| 1332248 | TCACTTT | nnnnnnn | sssssss | 27062 | 27079 | 51 |
| | CATAATG | nnnnnnn | sssssos | | | |
| | CTGGA | nnnnd | osso | | | |
| 1332249 | TCACTTT | nnnnnnn | sssssss | 27062 | 27079 | 51 |
| | CATAATG | nnnnnnn | sssssos | | | |
| | CTGGA | nnnne | osso | | | |
| 1332251 | TCACTTT | nnnnnnn | sssssss | 27061 | 27079 | 39 |
| | CATAATG | nnnnnnn | sssssos | | | |
| | CTGGC | nnnne | osso | | | |
| 1332255 | TCACTTT | eeeeeee | sssssss | 27061 | 27079 | 39 |
| | CATAATG | eeeeeee | sssssos | | | |
| | CTGGC | eeeed | osso | | | |
| 1332257 | TCACTTT | eeeeeee | sssssss | 27062 | 27079 | 51 |
| | CATAATG | eeeeeee | sssssos | | | |
| | CTGGA | eeeed | osso | | | |
| 1332256 | TCACTTT | eeeeeee | sssssss | 27062 | 27079 | 51 |
| | CATAATG | eeeeeee | sssssos | | | |
| | CTGGA | eeeee | osso | | | |
| 1332258 | TCACTTT | eeeeeee | sssssss | 27061 | 27079 | 39 |
| | CATAATG | eeeeeee | sssssos | | | |
| | CTGGC | eeeee | osso | | | |

### Table 8

[0218] The modified oligonucleotides in Table 8 below are each 19 nucleosides in length. Each nucleoside comprises a 2′-MOE sugar moiety, a 2′-NMA sugar moiety, or a 2′-β-D-deoxyribosyl sugar moiety. The sugar motif for each modified oligonucleotide is provided in the Sugar Motifcolumn, wherein each ‘e’ ipresents a 2′-MOE sugar moiety, each ‘n’ represents a 2′-NMA sugar moiety, and each ‘d’ represents a 2′-β-D-deoxyribosyl sugar moiety. Each intermucleoside linkage is either a phosphorothioate intermucleoside linkage or a phosphodiester intermucleoside linkage. The intermucleoside linkage motif for each modified oligonucleotide, provided in the Intermucleoside Linkage Motif column, is (from 5′ to 3′): ssssssssssssssosso; wherein each ‘s’ represents a phosphorothioate interucleoside linkage, and each ‘o’ represents a phosphodiester intermucleoside linkage. Each cytosine is a 5-methyl cytosine.

[0219] Each nucleobase in the modified oligonucleotide listed in Table 8 below is complementary to SEQ ID NO: 1 (GENBANK Acession No. NT_006713.14 truncated from nucleotides 19939708 to 19967777), unless specifically stated otherwise. Non-complementary nucleobases are specified in the Nucleobase Sequence column in underlined, bold, italicized font. “Start site” indicates the 5′-most nucleoside to which the modified oligonucleotide is complementary in the target nucleic acid sequence. “Stop site” indicates the 3′-most nucleoside to which the modified oligonucleotide is complementary in the target nucleic acid sequence.

TABLE 8
Modified oligonucleotides with mixed
PS/PO internucleoside linkages

| | | | Inter- | | | |
|---|---|---|---|---|---|---|
| | Nucleo- | | nucleo- | SEQ | SEQ | |
| | base | | side | ID | ID | |
| | Se- | Sugar | Linkage | No: | No: | |
| | quence | Motif | Motif | 1 | 1 | SEQ |
| Compound | (5′ to | (5′ to | (5′ to | Start | Stop | ID |
| Number | 3′) | 3′) | 3′) | Site | Site | No. |
| 1332250 | TCACTTT | nnnnnnn | sssssss | 27062 | 27079 | 51 |
| | CATAATG | nnnnnnn | sssssss | | | |
| | CTGGA | nnnnd | osso | | | |
| 1332252 | TCACTTT | nnnnnnn | sssssss | 27061 | 27079 | 39 |
| | CATAATG | nnnnnnn | sssssss | | | |
| | CTGGC | nnnnd | osso | | | |
| 1332253 | TCACTTT | nnnnnnn | sssssss | 27062 | 27079 | 51 |
| | CATAATG | nnnnnnn | sssssss | | | |
| | CTGGA | nnnne | osso | | | |
| 1332254 | TCACTTT | nnnnnnn | sssssss | 27061 | 27079 | 39 |
| | CATAATG | nnnnnnn | sssssss | | | |
| | CTGGC | nnnne | osso | | | |
| 1332259 | TCACTTT | eeeeeee | sssssss | 27062 | 27079 | 51 |
| | CATAATG | eeeeeee | sssssss | | | |
| | CTGGA | eeeed | osso | | | |
| 1332260 | TCACTTT | eeeeeee | sssssss | 27061 | 27079 | 39 |
| | CATAATG | eeeeeee | sssssss | | | |
| | CTGGC | eeeed | osso | | | |
| 1332261 | TCACTTT | eeeeeee | sssssss | 27062 | 27079 | 51 |
| | CATAATG | eeeeeee | sssssss | | | |
| | CTGGA | eeeee | osso | | | |
| 1332262 | TCACTTT | eeeeeee | sssssss | 27061 | 27079 | 39 |
| | CATAATG | eeeeeee | sssssss | | | |
| | CTGGC | eeeee | osso | | | |

### Table 9

[0220] The modified oligonucleotides in Table 9 below are each 19 nucleosides in length. Each nucleoside comprises a 2′-MOE sugar moiety or a 2′-NMA sugar moiety. The sugar motif for each modified oligonucleotide is provided in the Sugar Motif column, wherein each ‘e’ represents a 2′-MOE sugar moiety, and each ‘n’ represents a 2′-NMA sugar moiety. Each intermucleoside linkage is either a phosphorothioate intermucleoside linkage or a phosphodiester internucleoside linkage. The intermucleoside linkage motif for each modified oligonucleotide, provided in the Internucleoside Linkage Motifcolun, is (from 5′ to 3′): osssssssssssssssss; wherein each 4s′ represents a phosphorothioate intermucleoside linkage, and each ‘o’ represents a phosphodiester intermucleoside linkage. Each cytosine is a 5-methyl cytosine.

[0221] Each nucleobase in the modified oligonucleotide listed in Table 9 below is complementary to SEQ ID NO: 1 (GENBANK Acession No. NT_006713.14 truncated from nucleotides 19939708 to 19967777), unless specifically stated otherwise. Non-complementary nucleobases are specified in the Nucleobase Sequence column in underlined, bold, italicized font. “Start site” indicates the 5′-most nucleoside to which the modified oligonucleotide is complementary in the target nucleic acid sequence. “Stop site” indicates the 3′-most nucleoside to which the modified oligonucleotide is complementary in the target nucleic acid sequence.

TABLE 9
Modified oligonucleotides with mixed
PS/PO internucleoside linkages

| | | | Inter- | | | |
|---|---|---|---|---|---|---|
| | Nucleo- | | nucleo- | SEQ | SEQ | |
| | base | | side | ID | ID | |
| | Se- | Sugar | Linkage | No: | No: | |
| | quence | Motif | Motif | 1 | 1 | SEQ |
| Compound | (5′ to | (5′ to | (5′ to | Start | Stop | ID |
| Number | 3′) | 3′) | 3′) | Site | Site | No. |
| 1287742 | CTCACTT | ennnnnn | ossssss | 27062 | 27079 | 62 |
| | TCATAAT | nnnnnnn | sssssss | | | |
| | GCTGG | nnnnn | ssss | | | |
| 1287743 | TTCACTT | ennnnnn | ossssss | 27062 | 27080 | 43 |
| | TCATAAT | nnnnnnn | sssssss | | | |
| | GCTGG | nnnnn | ssss | | | |
| 1287744 | ATCACTT | ennnnnn | ossssss | 27062 | 27079 | 63 |
| | TCATAAT | nnnnnnn | sssssss | | | |
| | GCTGG | nnnnn | ssss | | | |
| 1287714 | CTCACTT | eeeeeee | ossssss | 27062 | 27079 | 62 |
| | TCATAAT | eeeeeee | sssssss | | | |
| | GCTGG | eeeee | ssss | | | |
| 1287716 | ATCACTT | eeeeeee | ossssss | 27062 | 27079 | 63 |
| | TCATAAT | eeeeeee | sssssss | | | |
| | GCTGG | eeeee | ssss | | | |
| 1287715 | TTCACTT | eeeeeee | ossssss | 27062 | 27080 | 43 |
| | TCATAAT | eeeeeee | sssssss | | | |
| | GCTGG | eeeee | ssss | | | |

### Table 10

[0222] The modified oligonucleotides in Table 10 below are each 20 nucleosides in length. Each nucleoside comprises a 2′-MOE sugar moiety or a 2′-NMA sugar moiety. The sugar motif for each modified oligonucleotide is provided in the Sugar Motif column, wherein each ‘e’ represents a 2′-MOE sugar moiety, and each ‘n’ represents a 2′-NMA sugar moiety. Each internucleoside linkage is either a phosphorothioate internucleoside linkage or a phosphodiester internucleoside linkage. The internucleoside linkage motif for each modified oligonucleotide, provided in the Internucleoside Linkage Motif column, is (from 5′ to 3′): ossssssssssssssssso; wherein each ‘s’ represents a phosphorothioate internucleoside linkage, and each ‘o’ represents a phosphodiester internucleoside linkage. Each cytosine is a 5-methyl cytosine.

[0223] Each modified oligonucleotide listed in Table 10 below is 100% complementary to SEQ ID NO: 1 (GENBANK Acession No. NT_006713.14 truncated from nucleotides 19939708 to 19967777). “Start site” indicates the 5′-most nucleoside to which the modified oligonucleotide is complementary in the target nucleic acid sequence. “Stop site” indicates the 3′-most nucleoside to which the modified oligonucleotide is complementary in the target nucleic acid sequence.

TABLE 10
Modified oligonucleotides with mixed
PS/PO internucleoside linkages

| | | | Inter- | | | |
|---|---|---|---|---|---|---|
| | Nucleo- | | nucleo- | SEQ | SEQ | |
| | base | | side | ID | ID | |
| | Se- | Sugar | Linkage | No: | No: | |
| | quence | Motif | Motif | 1 | 1 | SEQ |
| Compound | (5′ to | (5′ to | (5′ to | Start | Stop | ID |
| Number | 3′) | 3′) | 3′) | Site | Site | No. |
| 1287745 | TTCACTT | ennnnnn | ossssss | 27061 | 27080 | 52 |
| | TCATAAT | nnnnnnn | sssssss | | | |
| | GCTGGC | nnnnne | sssso | | | |
| 1287717 | TTCACTT | eeeeeee | ossssss | 27061 | 27080 | 52 |
| | TCATAAT | eeeeeee | sssssss | | | |
| | GCTGGC | eeeeee | sssso | | | |

### Example 2: Activity of Modified Oligonucleotides Complementary to Human SMN2 in Transgenic Mice, Single Dose (35 μg)

[0224] Activity of selected modified oligonucleotides described above was tested in human SMN2 transgenic mice. Taiwan strain of SMA type III mice were obtained from The Jackson Laboratory (Bar Harbor, Maine). These mice lack mouse SMN and are homozygous for human SMN2 (mSMN −/−; hSMN2+/+; FVB.Cg-Tg(SMN2)₂HungSMNltmlHung/J, stock number 005058; Bar Harbor, Maine), or are heterozygous for human SMN2 (Tg(SMN2)₂Hung FVB.Cg-SmnltmlHung Tg(SMN2)₂Hung/J (stock #00005058) bred to FVB/NJ (Stock #001800)).

### Treatment

[0225] Homozygous or heterozygous transgenic mice were divided into groups of 4 mice each. Each mouse received a single ICV bolus of 35 μg of modified oligonucleotide. Comparator Compound Nos. 387954, 396442, and 396443 were also tested in this assay. A group of 4 mice received PBS as a negative control.

### RNA Analysis

[0226] Two weeks post treatment, mice were sacrificed and RNA was extracted from cortical brain tissue and spinal cord for real-time qPCR analysis of SMN2 RNA expression. Primer probe set hSMN2vd #4_LTS00216_MGB (forward sequence: GCTGATGCTTTGGGAAGTATGTTA (SEQ ID NO: 11); reverse sequence CACCTTCCTTCTTTTTGATTTTGTC, designated herein as SEQ ID NO: 12; probe sequence TACATGAGTGGCTATCATACT (SEQ ID NO: 13)) was used to determine the amount of SMN2 RNA including exon 7 (exon 7⁺). PrimerNprobe set hSnN2_Sumner68_PPx50481 (forward sequence: CATGGTACATGAGTGGCTATCATACTG (SEQ ID NO: 14); reverse sequence: TGGTGTCATTTAGTGCTGCTCTATG (SEQ ID NO: 15); probe sequence CCAGCATTTCCATATAATAGC (SEQ TD NO: 16) was used to determine the amount of SMN2 RNA excluding exon 7 (exon 7-) Total SMN2 RNA levels were measured using primer probe set hSMN2_LTS00935 (forward sequence: CAGGAGGATTCCGTGCTGTT (SEQ TD NO: 17); reverse sequence CAGTGCTGTATCATCCCAAATGTC, (SEQ TD NO: 18); probe sequence: ACAGGCCAGAGCGAT (SEQ ID NO: 19)).

[0227] Results are presented as fold change in RNA levels relative to PBS control, normalized to total SMN2 levels. Each of Tables 11-17 represents a differint experiment.

TABLE 11
Effect of modified oligonucleotides on human SMN2
RNA splicing in homozygous transgenic mice

| Compound | Dose | CORTEX | | SPINAL CORD | |
|---|---|---|---|---|---|
| No. | (μg) | exon 7⁺ | exon 7⁻ | exon 7⁺ | exon 7⁻ |
| PBS | — | 1 | 1 | 1 | 1 |
| 396442 | 35 | 3.3 | 0.3 | 3.4 | 0.3 |
| 396443 | 35 | 3.0 | 0.5 | 2.3 | 0.5 |
| 524403 | 35 | 3.3 | 0.4 | 2.5 | 0.5 |
| 1210339 | 35 | 2.5 | 0.5 | 3.0 | 0.3 |
| 1210340 | 35 | 2.1 | 0.6 | 2.6 | 0.4 |
| 1210341 | 35 | 1.8 | 0.7 | 2.0 | 0.6 |
| 1210342 | 35 | 2.5 | 0.5 | 2.9 | 0.3 |
| 1210343 | 35 | 3.0 | 0.4 | 2.4 | 0.5 |
| 1212817 | 35 | 2.4 | 0.6 | 2.2 | 0.6 |
| 1212818 | 35 | 2.4 | 0.5 | 2.1 | 0.6 |
| 1212823 | 35 | 2.0 | 0.6 | 2.0 | 0.6 |
| 1212824 | 35 | 2.1 | 0.6 | 2.1 | 0.6 |
| 1212825 | 35 | 2.9 | 0.4 | 2.5 | 0.5 |
| 1212826 | 35 | 2.5 | 0.6 | 2.2 | 0.7 |
| 1212827 | 35 | 2.5 | 0.6 | 2.6 | 0.5 |
| 1212828 | 35 | 2.9 | 0.5 | 2.4 | 0.6 |
| 1212830 | 35 | 2.8 | 0.7 | 2.1 | 0.8 |
| 1212831 | 35 | 2.5 | 0.7 | 2.3 | 0.7 |
| 1212832 | 35 | 2.9 | 0.6 | 2.9 | 0.5 |
| 1212833 | 35 | 2.4 | 0.7 | 2.7 | 0.5 |
| 1212837 | 35 | 2.5 | 0.6 | 2.7 | 0.5 |
| 1212838 | 35 | 2.1 | 0.7 | 2.5 | 0.6 |
| 1212844 | 35 | 2.6 | 0.6 | 2.4 | 0.7 |
| 1212845 | 35 | 2.3 | 0.7 | 2.5 | 0.7 |
| 1212846 | 35 | 2.8 | 0.6 | 2.6 | 0.6 |
| 1212849 | 35 | 2.1 | 0.7 | 2.3 | 0.6 |
| 1212850 | 35 | 1.8 | 0.8 | 2.2 | 0.7 |
| 1212855 | 35 | 2.0 | 0.7 | 2.1 | 0.8 |

TABLE 12
Effect of modified oligonucleotides on human SMN2
RNA splicing in homozygous transgenic mice

| Compound | Dose | CORTEX | | SPINAL CORD | |
|---|---|---|---|---|---|
| No. | (μg) | exon 7⁺ | exon 7⁻ | exon 7⁺ | exon 7⁻ |
| PBS | — | 1.0 | 1.0 | 1.0 | 1.0 |
| 396443 | 35 | 2.7 | 0.3 | 1.9 | 0.5 |
| 1210342 | 35 | 2.4 | 0.5 | 2.5 | 0.4 |
| 1212961 | 35 | 1.8 | 0.7 | 1.7 | 0.6 |
| 1212962 | 35 | 2.0 | 0.6 | 1.9 | 0.5 |
| 1212963 | 35 | 2.3 | 0.5 | 2.5 | 0.3 |
| 1212966 | 35 | 1.6 | 0.8 | 2.0 | 0.5 |
| 1212967 | 35 | 1.9 | 0.6 | 1.9 | 0.4 |
| 1212971 | 35 | 1.6 | 0.5 | 2.0 | 0.4 |
| 1212972 | 35 | 1.8 | 0.6 | 2.2 | 0.5 |
| 1212977 | 35 | 2.1 | 0.5 | 2.2 | 0.4 |
| 1212978 | 35 | 2.1 | 0.6 | 2.2 | 0.4 |
| 1212979 | 35 | 2.1 | 0.5 | 2.6 | 0.3 |
| 1212982 | 35 | 2.0 | 0.7 | 1.8 | 0.6 |
| 1212983 | 35 | 1.9 | 0.6 | 1.7 | 0.5 |
| 1212984 | 35 | 1.9 | 0.6 | 1.9 | 0.5 |
| 1212987 | 35 | 2.4 | 0.4 | 2.5 | 0.4 |
| 1212988 | 35 | 1.8 | 0.7 | 1.8 | 0.5 |
| 1212995 | 35 | 2.5 | 0.5 | 2.5 | 0.4 |
| 1212998 | 35 | 1.8 | 0.6 | 1.8 | 0.7 |
| 1212999 | 35 | 2.0 | 0.6 | 2.0 | 0.5 |
| 1213003 | 35 | 1.9 | 0.7 | 2.3 | 0.5 |
| 1213004 | 35 | 1.8 | 0.7 | 2.3 | 0.6 |

TABLE 13
Effect of modified oligonucleotides on human SMN2
RNA splicing in homozygous transgenic mice

| Compound | Dose | CORTEX | | SPINAL CORD | |
|---|---|---|---|---|---|
| No. | (μg) | exon 7⁺ | exon 7⁻ | exon 7⁺ | exon 7⁻ |
| PBS | — | 1.0 | 1.0 | 1.0 | 1.0 |
| 396443 | 35 | 2.6 | 0.5 | 3.1 | 0.5 |
| 1212964 | 35 | 2.5 | 0.6 | 3.6 | 0.4 |
| 1212965 | 35 | 2.9 | 0.5 | 3.3 | 0.4 |
| 1212968 | 35 | 2.2 | 0.6 | 2.3 | 0.6 |
| 1212973 | 35 | 2.6 | 0.5 | 3.2 | 0.4 |
| 1212974 | 35 | 2.3 | 0.6 | 2.8 | 0.5 |
| 1212975 | 35 | 2.9 | 0.3 | 3.1 | 0.4 |
| 1212976 | 35 | 2.5 | 0.5 | 2.8 | 0.5 |
| 1212980 | 35 | 2.6 | 0.5 | 3.2 | 0.4 |
| 1212981 | 35 | 2.9 | 0.4 | 3.6 | 0.3 |
| 1212985 | 35 | 2.4 | 0.6 | 2.9 | 0.5 |
| 1212986 | 35 | 2.8 | 0.4 | 3.3 | 0.4 |
| 1212989 | 35 | 3.3 | 0.3 | 3.6 | 0.2 |
| 1212990 | 35 | 1.8 | 0.8 | 2.1 | 0.7 |
| 1212991 | 35 | 3.2 | 0.3 | 3.8 | 0.3 |
| 1212992 | 35 | 2.4 | 0.5 | 2.2 | 0.6 |
| 1212996 | 35 | 2.2 | 0.6 | 3.2 | 0.5 |
| 1212997 | 35 | 2.9 | 0.4 | 3.9 | 0.4 |
| 1213001 | 35 | 2.1 | 0.5 | 2.8 | 0.6 |
| 1213002 | 35 | 2.0 | 0.6 | 2.9 | 0.6 |
| 1213005 | 35 | 2.8 | 0.5 | 3.2 | 0.3 |
| 1213006 | 35 | 1.9 | 0.9 | 2.0 | 0.8 |
| 1213007 | 35 | 3.3 | 0.2 | 2.9 | 0.5 |
| 1213008 | 35 | 2.3 | 0.7 | 2.2 | 0.7 |

TABLE 14
Effect of modified oligonucleotides on human SMN2
RNA splicing in heterozygous transgenic mice

| Compound | Dose | CORTEX | | SPINAL CORD | |
|---|---|---|---|---|---|
| No. | (μg) | exon 7⁺ | exon 7⁻ | exon 7⁺ | exon 7⁻ |
| PBS | — | 1.0 | 1.0 | 1.0 | 1.0 |
| 387954 | 35 | 2.3 | 0.6 | 2.2 | 0.5 |
| 396443 | 35 | 2.5 | 0.5 | 2.4 | 0.5 |
| 1287048 | 35 | 2.2 | 0.5 | 2.2 | 0.5 |
| 1287049 | 35 | 2.3 | 0.6 | 2.5 | 0.4 |
| 1287061 | 35 | 2.4 | 0.5 | 2.2 | 0.4 |
| 1287062 | 35 | 3.0 | 0.3 | 2.3 | 0.4 |
| 1287050 | 35 | 2.8 | 0.5 | 2.3 | 0.4 |
| 1287054 | 35 | 2.2 | 0.5 | 2.3 | 0.4 |
| 1287063 | 35 | 1.8 | 0.7 | 1.7 | 0.6 |
| 1287064 | 35 | 2.6 | 0.3 | 2.4 | 0.4 |
| 1287065 | 35 | 2.5 | 0.4 | 2.3 | 0.4 |
| 1287066 | 35 | 2.2 | 0.5 | 2 | 0.5 |
| 1287075 | 35 | 2.3 | 0.6 | 1.8 | 0.7 |
| 1287076 | 35 | 2.6 | 0.4 | 1.9 | 0.6 |
| 1287067 | 35 | 2.7 | 0.4 | 1.9 | 0.6 |
| 1287070 | 35 | 2.5 | 0.5 | 1.8 | 0.7 |
| 1287071 | 35 | 2.6 | 0.4 | 1.8 | 0.7 |
| 1287074 | 35 | 2.6 | 0.5 | 2 | 0.6 |
| 1287109 | 35 | 2.7 | 0.6 | 2.4 | 0.5 |
| 1287110 | 35 | 2.6 | 0.5 | 2.3 | 0.5 |
| 1287701 | 35 | 2.6 | 0.6 | 2.8 | 0.3 |
| 1287702 | 35 | 3 | 0.5 | 2.8 | 0.4 |
| 1287703 | 35 | 2.3 | 0.6 | 2.4 | 0.4 |
| 1287704 | 35 | 2.7 | 0.5 | 2.3 | 0.4 |
| 1287717 | 35 | 3.3 | 0.3 | 2.4 | 0.6 |

TABLE 15
Effect of modified oligonucleotides on human SMN2
RNA splicing in heterozygous transgenic mice

| Compound | Dose | CORTEX | | SPINAL CORD | |
|---|---|---|---|---|---|
| No. | (μg) | exon 7⁺ | exon 7⁻ | exon 7⁺ | exon 7⁻ |
| PBS | — | 1 | 1 | 1 | 1 |
| 396442 | 35 | 2.5 | 0.6 | 3.2 | 0.3 |
| 396443 | 35 | 3 | 0.5 | 2.8 | 0.5 |
| 1263783 | 35 | 3 | 0.3 | 2.6 | 0.5 |
| 1263785 | 35 | 3.1 | 0.4 | 2.9 | 0.5 |
| 1263787 | 35 | 2.4 | 0.6 | 2.9 | 0.4 |
| 1263789 | 35 | 3.8 | 0.2 | 2.6 | 0.5 |
| 1263800 | 35 | 3.6 | 0.2 | 2.6 | 0.5 |
| 1263802 | 35 | 3.4 | 0.3 | 2.9 | 0.4 |
| 1263806 | 35 | 3.5 | 0.2 | 2.7 | 0.5 |
| 1263808 | 35 | 3.2 | 0.4 | 2.7 | 0.5 |
| 1263810 | 35 | 2.8 | 0.5 | 2.4 | 0.5 |

TABLE 16
Effect of modified oligonucleotides on human SMN2
RNA splicing in heterozygous transgenic mice

| Compound | Dose | CORTEX | | SPINAL CORD | |
|---|---|---|---|---|---|
| No. | (μg) | exon 7⁺ | exon 7⁻ | exon 7⁺ | exon 7⁻ |
| PBS | — | 1 | 1 | 1 | 1 |
| 396443 | 35 | 2.5 | 0.6 | 2.9 | 0.4 |
| 1364784 | 35 | 2.3 | 0.7 | 2.8 | 0.5 |
| 1364783 | 35 | 2.9 | 0.5 | 2.4 | 0.5 |
| 1364777 | 35 | 2.7 | 0.6 | 2.3 | 0.5 |
| 1364782 | 35 | 2.7 | 0.6 | 2.6 | 0.5 |

TABLE 17
Effect of modified oligonucleotides on human SMN2
RNA splicing in heterozygous transgenic mice

| Compound | Dose | CORTEX | | SPINAL CORD | |
|---|---|---|---|---|---|
| No. | (μg) | exon 7⁺ | exon 7⁻ | exon 7⁺ | exon 7⁻ |
| PBS | — | 1 | 1 | 1 | 1 |
| 396443 | 35 | 2 | 0.7 | 2.7 | 0.5 |
| 1318748 | 35 | 2.1 | 0.7 | 2.5 | 0.6 |
| 1318782 | 35 | 2.2 | 0.8 | 2.5 | 0.6 |
| 1332262 | 35 | 3.3 | 0.4 | 2.9 | 0.5 |
| 1332258 | 35 | 2.4 | 0.7 | 2.3 | 0.6 |

### Example 3: Activity of Modified Oligonucleotides Complementary to Human SMN2 in Transgenic Mice, Single Dose (15 μg)

[0228] Activity of selected modified oligonucleotides described above was tested in human SMN2 transgenic mice essentially as described above in Example 2. Comparator Compound Nos. 396443 and 819735 were also tested in this assay. The transgenic mice were divided into groups of 4 mice each. Each mouse received a single ICV bolus of 15 μg of modified oligonucleotide. A group of 4 mice received PBS as a negative control. Two weeks post treatment, mice were sacrificed and RNA was extracted from cortical brain tissue and spinal cord for real-time qPCR analysis of SMN2 RNA expression. Results are presented as fold change in RNA levels relative to PBS control, normalized to total SMN2 levels. Each of Tables 18-22 represents a different experiment.

TABLE 18
Effect of modified oligonucleotides on human SMN2
RNA splicing in homozygous transgenic mice

| Compound | Dose | CORTEX | | SPINAL CORD | |
|---|---|---|---|---|---|
| No. | (μg) | exon 7⁺ | exon 7⁻ | exon 7⁺ | exon 7⁻ |
| PBS | — | 1.0 | 1.0 | 1.0 | 1.0 |
| 819735 | 15 | 2.4 | 0.4 | 3.3 | 0.3 |
| 1212869 | 15 | 2.4 | 0.4 | 3.2 | 0.4 |
| 1212870 | 15 | 2.1 | 0.5 | 2.8 | 0.4 |
| 1212873 | 15 | 2.2 | 0.4 | 2.0 | 0.6 |
| 1212874 | 15 | 2.1 | 0.5 | 2.4 | 0.6 |
| 1212875 | 15 | 2.1 | 0.5 | 2.3 | 0.5 |
| 1212880 | 15 | 1.7 | 0.6 | 2.0 | 0.6 |
| 1212881 | 15 | 1.8 | 0.6 | 2.3 | 0.6 |
| 1212885 | 15 | 2.3 | 0.4 | 2.4 | 0.5 |
| 1212887 | 15 | 2.0 | 0.5 | 2.2 | 0.5 |
| 1212931 | 15 | 2.9 | 0.2 | 2.9 | 0.3 |
| 1212936 | 15 | 2.9 | 0.3 | 3.3 | 0.3 |
| 1212941 | 15 | 3.0 | 0.1 | 3.4 | 0.2 |

TABLE 19
Effect of modified oligonucleotides on human SMN2
RNA splicing in heterozygous transgenic mice

| Compound | Dose | CORTEX | | SPINAL CORD | |
|---|---|---|---|---|---|
| No. | (μg) | exon 7⁺ | exon 7⁻ | exon 7⁺ | exon 7⁻ |
| PBS | — | 1.0 | 1.0 | 1.0 | 1.0 |
| 396443 | 15 | 2.2 | 0.5 | 2.2 | 0.7 |
| 819735 | 15 | 2.7 | 0.5 | 3.1 | 0.5 |
| 1287122 | 15 | 2.9 | 0.5 | 2.3 | 0.6 |
| 1287123 | 15 | 3.0 | 0.4 | 3.0 | 0.4 |
| 1287124 | 15 | 3.0 | 0.4 | 3.2 | 0.3 |
| 1287125 | 15 | 3.0 | 0.4 | 3.0 | 0.4 |
| 1287126 | 15 | 2.8 | 0.4 | 2.8 | 0.4 |
| 1287127 | 15 | 2.7 | 0.5 | 3.0 | 0.5 |
| 1287128 | 15 | 2.6 | 0.5 | 3.2 | 0.5 |
| 1287129 | 15 | 2.9 | 0.4 | 2.9 | 0.5 |
| 1287130 | 15 | 3.7 | 0.1 | 3.1 | 0.5 |
| 1287131 | 15 | 2.2 | 0.6 | 2.7 | 0.4 |
| 1287132 | 15 | 3.2 | 0.3 | 2.2 | 0.6 |
| 1287133 | 15 | 2.9 | 0.4 | 2.8 | 0.4 |
| 1287728 | 15 | 2.8 | 0.6 | 3.4 | 0.3 |
| 1287729 | 15 | 3.1 | 0.4 | 3.0 | 0.3 |
| 1287730 | 15 | 3.1 | 0.3 | 2.7 | 0.4 |
| 1287731 | 15 | 3.3 | 0.3 | 2.8 | 0.5 |
| 1287735 | 15 | 2.9 | 0.5 | 2.6 | 0.5 |
| 1287738 | 15 | 3.7 | 0.2 | 3.2 | 0.3 |
| 1287739 | 15 | 3.3 | 0.4 | 3.2 | 0.4 |
| 1287743 | 15 | 3.6 | 0.4 | 3.8 | 0.4 |
| 1287745 | 15 | 3.1 | 0.5 | 3.8 | 0.5 |

TABLE 20
Effect of modified oligonucleotides on human SMN2
RNA splicing in heterozygous transgenic mice

| Compound | Dose | CORTEX | | SPINAL CORD | |
|---|---|---|---|---|---|
| No. | (μg) | exon 7⁺ | exon 7⁻ | exon 7⁺ | exon 7⁻ |
| PBS | — | 1 | 1 | 1 | 1.0 |
| 396443 | 15 | 1.9 | 0.6 | 1.7 | 0.7 |
| 819735 | 15 | 2.3 | 0.5 | 1.9 | 0.6 |

TABLE 21
Effect of modified oligonucleotides on human SMN2
RNA splicing in heterozygous transgenic mice

| Compound | Dose | CORTEX | | SPINAL CORD | |
|---|---|---|---|---|---|
| No. | (μg) | exon 7⁺ | exon 7⁻ | exon 7⁺ | exon 7⁻ |
| PBS | — | 1 | 1 | 1 | 1 |
| 1364781 | 15 | 2.5 | 0.6 | 2.7 | 0.4 |
| 1364780 | 15 | 2.8 | 0.5 | 2.6 | 0.5 |
| 1364779 | 15 | 2.7 | 0.5 | 2.6 | 0.5 |
| 1364778 | 15 | 3 | 0.5 | 2.7 | 0.4 |

TABLE 22
Effect of modified oligonucleotides on human SMN2
RNA splicing in heterozygous transgenic mice

| Compound | Dose | CORTEX | | SPINAL CORD | |
|---|---|---|---|---|---|
| No. | (μg) | exon 7⁺ | exon 7⁻ | exon 7⁺ | exon 7⁻ |
| PBS | — | 1 | 1 | 1 | 1 |
| 819735 | 15 | 2.8 | 0.5 | 2.4 | 0.6 |
| 1332265 | 15 | 2.1 | 0.7 | 2.6 | 0.6 |
| 1332269 | 15 | 2.5 | 0.6 | 2.7 | 0.5 |
| 1332268 | 15 | 2.9 | 0.5 | 2.3 | 0.6 |
| 1318756 | 15 | 2.2 | 0.7 | 2.4 | 0.6 |
| 1333508 | 15 | 2 | 0.6 | 2.2 | 0.6 |
| 1332251 | 15 | 2.9 | 0.5 | 1.9 | 0.7 |
| 1332249 | 15 | 2.3 | 0.7 | 2.3 | 0.7 |

### Example 4: Activity of Modified Oligonucleotides Complementary to Human SMN2 in Transgenic Mice, Single Dose (70 μg)

[0229] Activity of modified oligonucleotides was tested in human SMN2 transgenic mice essentially as described above in Example 2. The transgenic mice were divided into groups of 4 mice each. Each mouse received a single ICV bolus of 70 μg modified oligonucleotide. A group of 4 mice received PBS as a negative control. Two weeks post treatment, mice were sacrificed and RNA was extracted from cortical brain tissue and spinal cord for real-time qPCR analysis of SMN2 RNA expression. Results are presented as fold change in RNA levels relative to PBS control, normalized to total SMN2 levels.

TABLE 23
Effect of modified oligonucleotides on human SMN2
RNA splicing in homozygous transgenic mice

| Compound | Dose | CORTEX | | SPINAL CORD | |
|---|---|---|---|---|---|
| No. | (μg) | exon 7⁺ | exon 7⁻ | exon 7⁺ | exon 7⁻ |
| PBS | — | 1 | 1 | 1 | 1 |
| 1212969 | 70 | 2.5 | 0.4 | 2.4 | 0.3 |
| 1212970 | 70 | 2.7 | 0.3 | 2.6 | 0.3 |

### Example 5: Activity of Modified Oligonucleotides Complementary to Human SMN2 in Transgenic Mice, Multiple Dose

[0230] Activity of selected modified oligonucleotides described above was tested in human SMN2 transgenic mice essentially as described above in Example 2. Comparator Compound No. 396443 was also tested in this assay. The transgenic mice were divided into groups of 4 mice each. Each mouse received a single ICV bolus of modified oligonucleotide at multiple doses as indicated in the tables below. A group of 4 mice received PBS as a negative control. Two weeks post treatment, mice were sacrificed and RNA was extracted from coronal brain and spinal cord for real-time qPCR analysis of SMN2 RNA expression. Results are presented as fold change in RNA levels relative to PBS control, normalized to total SMN2 levels. ED₅₀ for exon inclusion (exon 7⁺) was calculated in GraphPad Prism 7 using nonlinear regression, 4-parameter dose response curve [Y=Bottom+(Top-Bottom)/(1+(10\hat{ }logEC50/X)\hat{ }HillSlope)].

TABLE 24
Effect of modified oligonucleotides on human SMN2
RNA splicing in homozygous transgenic mice

| | | CORONAL | | | SPINAL | | |
|---|---|---|---|---|---|---|---|
| Compound | Dose | BRAIN | | ED50 | CORD | | ED50 |
| No. | (μg) | exon 7⁺ | exon 7⁻ | (μg) | exon 7⁺ | exon 7⁻ | (μg) |
| PBS | — | 1.0 | 1.0 | | 1.0 | 1.0 | |
| 396443 | 3 | 1.4 | 0.9 | 32.5 | 1.3 | 0.9 | 22.1 |
| | 10 | 1.8 | 0.8 | | 2.0 | 0.7 | |
| | 30 | 2.6 | 0.5 | | 2.6 | 0.4 | |
| | 100 | 3.5 | 0.4 | | 3.2 | 0.3 | |
| | 300 | 4.2 | 0.1 | | 3.6 | 0.2 | |
| 1263789 | 3 | 1.5 | 0.9 | 38.3 | 1.5 | 0.8 | 13.3 |
| | 10 | 2.0 | 0.7 | | 2.2 | 0.6 | |
| | 30 | 2.3 | 0.6 | | 3.0 | 0.4 | |
| | 100 | 3.4 | 0.3 | | 3.4 | 0.3 | |
| | 300 | 3.9 | 0.1 | | 3.7 | 0.2 | |
| 1287717 | 3 | 1.3 | 0.8 | 38.7 | 1.3 | 0.9 | 20.5 |
| | 10 | 1.8 | 0.7 | | 1.9 | 0.7 | |
| | 30 | 2.4 | 0.7 | | 2.7 | 0.5 | |
| | 100 | 3.5 | 0.4 | | 3.3 | 0.3 | |
| | 300 | 4.1 | 0.1 | | 3.8 | 0.2 | |
| 1358996 | 3 | 1.6 | 0.9 | 16.6 | 1.7 | 0.8 | 7.4 |
| | 10 | 2.5 | 0.6 | | 2.6 | 0.5 | |
| | 30 | 3.0 | 0.4 | | 3.5 | 0.2 | |
| | 100 | 4.0 | 0.2 | | 3.6 | 0.2 | |
| | 300 | 4.0 | 0.1 | | 3.9 | 0.1 | |
| 1287745 | 3 | 1.5 | 0.8 | 22.8 | 1.7 | 0.7 | 8.8 |
| | 10 | 2.1 | 0.6 | | 2.4 | 0.5 | |
| | 30 | 3.0 | 0.3 | | 3.3 | 0.3 | |
| | 100 | 3.6 | 0.1 | | 3.5 | 0.2 | |
| | 300 | 4.2 | 0.1 | | 3.8 | 0.1 | |

### Example 6: Tolerability of Modified Oligonucleotides Complementary to SMN2 in Wild-Type Mice, 3 Hour Study

[0231] Modified oligonucleotides described above were tested in wild-type female C57/B16 mice to assess tolerability. Wild-type female C57/B16 mice each received a single ICV dose of 700 μg of modified oligonucleotide listed in the tables below. Comparator Compound No. 396443 was also tested in this assay with a dose of 350 μg. Comparator Compound Nos. 387954, 396442, 443305, and 819735 were also tested in this assay with a dose of 700 μg. Each treatment group consisted of 4 mice. A group of 4 mice received PBS as a negative control for each experiment (identified in separate tables below). At 3 hours post-injection, mice were evaluated according to seven different criteria. The criteria are (1) the mouse was bright, alert, and responsive; (2) the mouse was standing or hunched without stimuli; (3) the mouse showed any movement without stimuli; (4) the mouse demonstrated forward movement after it was lifted; (5) the mouse demonstrated any movement after it was lifted; (6) the mouse responded to tail pinching; (7) regular breathing. For each of the 7 criteria, a mouse was given a subscore of 0 if it met the criteria and 1 if it did not (the functional observational battery score or FOB). After all 7 criteria were evaluated, the scores were summed and averaged within each treatment group. The results are presented in the tables below. Each of Tables 25-48 represents a different experiment.

TABLE 25
Tolerability scores in mice at 350 μg dose

| Compound | |
|---|---|
| Number | 3 hr FOB |
| 396443 | 3.5 |

TABLE 26
Tolerability scores in mice at 700 μg dose

| Compound | |
|---|---|
| Number | 3 hr FOB |
| 443305 | 4.75 |

TABLE 27
Tolerability scores in mice at 700 μg dose

| Compound | 3 hr |
|---|---|
| Number | FOB |
| PBS | 0 |
| 396442 | 2.5 |
| 524403 | 3.25 |
| 1210339 | 1.25 |
| 1210340 | 2.25 |
| 1210341 | 3.75 |
| 1210342 | 0 |
| 1210343 | 0 |
| 1212817 | 0 |
| 1212818 | 0 |
| 1212819 | 0 |
| 1212820 | 0 |
| 1212821 | 0 |
| 1212822 | 0 |
| 1212823 | 0 |
| 1212824 | 0 |
| 1212825 | 1 |
| 1212826 | 0 |
| 1212827 | 0 |
| 1212828 | 0 |
| 1212829 | 0 |
| 1212830 | 0 |
| 1212831 | 0 |

TABLE 28
Tolerability scores in mice at 700 μg dose

| Compound | 3 hr |
|---|---|
| Number | FOB |
| PBS | 0.00 |
| 396442 | 2.50 |
| 1210340 | 3.50 |
| 1212850 | 0.50 |
| 1212851 | 0.75 |
| 1212852 | 0.00 |
| 1212853 | 0.00 |
| 1212854 | 0.25 |
| 1212855 | 0.25 |
| 1212856 | 0.00 |
| 1212857 | 0.00 |
| 1212858 | 0.00 |
| 1212859 | 0.00 |
| 1212860 | 0.75 |
| 1212861 | 1.00 |
| 1212863 | 2.00 |
| 1212864 | 0.00 |
| 1212866 | 0.75 |
| 1212867 | 0.00 |
| 1212868 | 0.00 |

TABLE 29
Tolerability scores in mice at 700 μg dose

| Compound | 3 hr |
|---|---|
| Number | FOB |
| PBS | 0.00 |
| 396442 | 3.25 |
| 1212961 | 0.00 |
| 1212963 | 1.00 |
| 1212964 | 2.00 |
| 1212965 | 1.25 |
| 1212966 | 1.25 |
| 1212968 | 0.00 |
| 1212971 | 1.00 |
| 1212972 | 3.25 |
| 1212973 | 0.50 |
| 1212974 | 2.00 |
| 1212975 | 0.50 |
| 1212976 | 1.75 |

TABLE 30
Tolerability scores in mice at 700 μg dose

| Compound | 3 hr |
|---|---|
| Number | FOB |
| PBS | 0.00 |
| 1212977 | 0.75 |
| 1212978 | 0.00 |
| 1212979 | 1.75 |
| 1212980 | 1.50 |
| 1212981 | 0.00 |
| 1212982 | 0.50 |
| 1212983 | 0.75 |
| 1212984 | 2.75 |
| 1212985 | 0.00 |
| 1212986 | 1.00 |
| 1212987 | 1.75 |
| 1212988 | 4.50 |
| 1212989 | 1.75 |
| 1212990 | 4.50 |
| 1212991 | 1.25 |
| 1212992 | 3.75 |

TABLE 31
Tolerability scores in mice at 700 μg dose

| Compound | 3 hr |
|---|---|
| Number | FOB |
| PBS | 0.00 |
| 1212993 | 7.00 |
| 1212994 | 6.50 |
| 1212995 | 4.25 |
| 1212996 | 3.25 |
| 1212997 | 4.00 |
| 1212998 | 2.00 |
| 1212999 | 1.00 |
| 1213000 | 1.25 |
| 1213001 | 3.00 |
| 1213002 | 2.00 |
| 1213003 | 4.00 |
| 1213004 | 3.00 |
| 1213005 | 3.75 |
| 1213006 | 4.00 |
| 1213007 | 4.00 |
| 1213008 | 3.50 |

TABLE 32
Tolerability scores in mice at 700 μg dose

| Compound | 3 hr |
|---|---|
| Number | FOB |
| PBS | 0.00 |
| 1212832 | 0.00 |
| 1212833 | 0.00 |
| 1212834 | 0.00 |
| 1212835 | 0.00 |
| 1212836 | 0.00 |
| 1212837 | 0.00 |
| 1212838 | 0.00 |
| 1212839 | 0.00 |
| 1212840 | 0.00 |
| 1212841 | 0.00 |
| 1212842 | 0.00 |
| 1212843 | 0.00 |
| 1212844 | 0.25 |
| 1212845 | 1.00 |
| 1212846 | 0.00 |
| 1212847 | 0.00 |
| 1212848 | 0.00 |
| 1212849 | 0.00 |

TABLE 33

| Tolerability scores in mice at 700 μg dose | |
|---|---|
| Compound | 3 hr |
| Number | FOB |
| PBS | 0.00 |
| 396442 | 1.75 |
| 1210339 | 1.00 |
| 1212865 | 1.00 |
| 1212962 | 0.00 |
| 1212967 | 0.50 |
| 1212969 | 0.50 |
| 1212970 | 1.25 |

TABLE 34
Tolerability scores in mice at 700 μg dose

| Compound | 3 hr |
|---|---|
| Number | FOB |
| PBS | 0.00 |
| 819735 | 2.00 |
| 1212869 | 2.00 |
| 1212870 | 4.75 |
| 1212871 | 1.00 |
| 1212873 | 0.00 |
| 1212874 | 0.00 |
| 1212875 | 0.00 |
| 1212879 | 3.00 |
| 1212880 | 0.00 |
| 1212881 | 4.00 |
| 1212885 | 1.00 |
| 1212887 | 2.25 |
| 1212931 | 2.00 |
| 1212936 | 2.00 |
| 1212941 | 1.25 |

TABLE 35
Tolerability scores in mice at 700 μg dose

| Compound | 3 hr |
|---|---|
| Number | FOB |
| PBS | 0.00 |
| 1263778 | 0.00 |
| 1263781 | 0.00 |
| 1263783 | 0.00 |
| 1263785 | 1.00 |
| 1263787 | 0.00 |
| 1263789 | 0.00 |
| 1263791 | 0.00 |
| 1263793 | 0.00 |
| 1263795 | 0.00 |
| 1263797 | 0.00 |
| 1263799 | 0.00 |
| 1263800 | 0.00 |
| 1263802 | 0.00 |
| 1263804 | 0.00 |
| 1263806 | 0.00 |
| 1263808 | 1.00 |
| 1263810 | 0.00 |
| 1263812 | 0.00 |
| 1263814 | 1.00 |
| 1263816 | 0.50 |
| 1263818 | 0.00 |
| 1263820 | 0.00 |
| 1263822 | 0.25 |
| 1263824 | 0.00 |

TABLE 36
Tolerability scores in mice at 700 μg dose

| Compound | 3 hr |
|---|---|
| Number | FOB |
| PBS | 0.00 |
| 1263826 | 0.00 |

TABLE 37
Tolerability scores in mice at 700 μg dose

| Compound | 3 hr |
|---|---|
| Number | FOB |
| PBS | 0.00 |
| 387954 | 4.00 |
| 1287048 | 0.00 |
| 1287049 | 0.00 |
| 1287050 | 2.00 |
| 1287051 | 3.25 |
| 1287052 | 3.50 |
| 1287053 | 2.75 |
| 1287054 | 2.00 |
| 1287055 | 3.25 |
| 1287056 | 4.00 |
| 1287057 | 3.00 |
| 1287058 | 4.00 |
| 1287059 | 4.00 |
| 1287060 | 4.00 |
| 1287061 | 4.00 |
| 1287062 | 3.50 |

TABLE 38
Tolerability scores in mice at 700 μg dose

| Compound | 3 hr |
|---|---|
| Number | FOB |
| PBS | 0.00 |
| 1287106 | 3.50 |
| 1287107 | 4.00 |
| 1287108 | 3.75 |
| 1287109 | 3.25 |
| 1287110 | 3.00 |
| 1287111 | 4.75 |
| 1287112 | 4.00 |
| 1287113 | 3.50 |
| 1287114 | 3.25 |
| 1287115 | 3.50 |
| 1287116 | 4.00 |
| 1287117 | 4.25 |
| 1287118 | 3.00 |
| 1287119 | 3.50 |
| 1287120 | 3.75 |
| 1287121 | 2.75 |

TABLE 39
Tolerability scores in mice at 700 μg dose

| Compound | 3 hr |
|---|---|
| Number | FOB |
| PBS | 0.00 |
| 1287063 | 0.00 |
| 1287064 | 0.00 |
| 1287065 | 1.00 |
| 1287066 | 3.75 |
| 1287067 | 1.00 |
| 1287068 | 2.50 |
| 1287069 | 2.25 |
| 1287071 | 1.00 |
| 1287072 | 3.00 |
| 1287073 | 3.75 |
| 1287074 | 1.75 |
| 1287075 | 3.50 |
| 1287076 | 2.00 |

TABLE 40
Tolerability scores in mice at 700 μg dose

| Compound | 3 hr |
|---|---|
| Number | FOB |
| PBS | 0.00 |
| 1287070 | 2.00 |
| 1287701 | 2.50 |
| 1287702 | 3.75 |
| 1287703 | 3.75 |
| 1287705 | 4.00 |
| 1287706 | 4.00 |
| 1287707 | 4.00 |
| 1287709 | 4.75 |
| 1287710 | 4.00 |
| 1287711 | 4.75 |
| 1287712 | 4.00 |
| 1287713 | 4.00 |
| 1287714 | 3.50 |
| 1287715 | 4.00 |
| 1287716 | 4.00 |
| 1287717 | 3.25 |

TABLE 41
Tolerability scores in mice at 700 μg dose

| Compound | 3 hr |
|---|---|
| Number | FOB |
| PBS | 0.00 |
| 1287728 | 1.00 |
| 1287729 | 1.25 |
| 1287730 | 2.00 |
| 1287731 | 2.50 |
| 1287732 | 3.00 |
| 1287733 | 3.25 |
| 1287734 | 3.00 |
| 1287735 | 0.50 |
| 1287736 | 2.50 |
| 1287737 | 4.00 |
| 1287738 | 3.00 |
| 1287739 | 2.50 |
| 1287740 | 2.75 |
| 1287741 | 3.75 |
| 1287742 | 3.00 |
| 1287743 | 2.75 |
| 1287744 | 2.25 |
| 1287745 | 1.00 |

TABLE 42
Tolerability scores in mice at 700 μg dose

| Compound | 3 hr |
|---|---|
| Number | FOB |
| PBS | 0.00 |
| 1287122 | 0.00 |
| 1287123 | 0.00 |
| 1287124 | 3.50 |
| 1287125 | 3.00 |
| 1287126 | 3.00 |
| 1287127 | 0.00 |
| 1287128 | 0.00 |
| 1287129 | 4.00 |
| 1287130 | 2.75 |
| 1287131 | 2.50 |
| 1287132 | 2.75 |
| 1287133 | 3.25 |
| 1287704 | 3.50 |
| 1287708 | 3.50 |

TABLE 43
Tolerability scores in mice at 700 μg dose

| Compound | 3 hr |
|---|---|
| Number | FOB |
| PBS | 0.00 |
| 1318748 | 2.00 |
| 1318765 | 4.00 |
| 1318767 | 4.25 |
| 1318770 | 3.75 |
| 1318771 | 4.50 |
| 1318772 | 4.25 |
| 1318773 | 4.25 |
| 1318774 | 3.50 |
| 1318775 | 3.75 |
| 1318776 | 3.75 |
| 1318777 | 4.00 |
| 1318778 | 4.00 |
| 1318779 | 4.00 |
| 1318780 | 4.00 |
| 1318781 | 4.00 |
| 1318782 | 1.00 |
| 1318783 | 4.00 |
| 1318784 | 2.00 |

TABLE 44
Tolerability scores in mice at 700 μg dose

| Compound | 3 hr |
|---|---|
| Number | FOB |
| PBS | 0.00 |
| 1318757 | 4.00 |
| 1318758 | 4.25 |
| 1318759 | 3.75 |
| 1318760 | 3.75 |
| 1318761 | 4.00 |
| 1318762 | 4.00 |
| 1318763 | 4.00 |
| 1318764 | 3.75 |
| 1318766 | 3.75 |
| 1318768 | 4.00 |
| 1318769 | 4.00 |

TABLE 45
Tolerability scores in mice at 700 μg dose

| Compound | 3 hr |
|---|---|
| Number | FOB |
| PBS | 0.00 |
| 1318749 | 4.25 |
| 1318750 | 2.25 |
| 1318751 | 4.00 |
| 1318752 | 3.75 |
| 1318753 | 2.25 |
| 1318754 | 3.00 |
| 1318755 | 3.75 |
| 1318756 | 0.00 |

TABLE 46
Tolerability scores in mice at 700 μg dose

| Compound | 3 hr |
|---|---|
| Number | FOB |
| PBS | 0.00 |
| 1332247 | 1.75 |
| 1332248 | 0.25 |
| 1332249 | 0.00 |
| 1332250 | 3.75 |
| 1332251 | 0.00 |
| 1332252 | 3.00 |
| 1332263 | 2.00 |
| 1332265 | 1.50 |
| 1332266 | 1.00 |
| 1332267 | 3.75 |
| 1332268 | 2.75 |
| 1332269 | 1.25 |
| 1332270 | 2.25 |
| 1332271 | 2.50 |
| 1333508 | 0.00 |

TABLE 47
Tolerability scores in mice at 700 μg dose

| Compound | 3 hr |
|---|---|
| Number | FOB |
| PBS | 0.00 |
| 1332255 | 1.00 |
| 1332256 | 2.00 |
| 1332257 | 1.25 |
| 1332258 | 1.25 |
| 1332259 | 2.25 |
| 1332260 | 2.25 |
| 1332261 | 2.50 |
| 1332262 | 2.00 |

TABLE 48
Tolerability scores in mice at 700 μg dose

| Compound | 3 hr |
|---|---|
| Number | FOB |
| PBS | 0.00 |
| 1358996 | 0.00 |
| 1364777 | 2.00 |
| 1364778 | 3.00 |
| 1364779 | 3.50 |
| 1364780 | 3.50 |
| 1364781 | 5.25 |
| 1364782 | 2.50 |
| 1364783 | 3.50 |
| 1364784 | 3.50 |

### Example 7: Tolerability of Modified Oligonucleotides Complementary to Human SMN2 in Rats, Long-Term Assessment

[0232] In separate studies run under the same conditions, selected modified oligonucleotides described above were tested in Sprague Dawley rats to assess long-term tolerability. Comparator Compound Nos. 396442 and 819735 were also tested in this assay. Sprague Dawley rats each received a single intrathecal (IT) delivered dose of 3 mg of oligonucleotide or PBS. Beginning 1 week post-treatment, each animal was weighed and evaluated weekly by a trained observer for adverse events. Adverse events were defined as neurological dysfunction not typical in PBS-treated control animals, including, but not limited to: abnormal limb splay, abnormal gait, tremors, abnormal respiration, paralysis, and spasticity. The onset of the adverse event is defined as the week post-dosing when the dysfunction was first recorded. If no adverse event was achieved, there is no onset (−). The onset of adverse events typically correlates with a failure to thrive as defined by a lack of body weight gain/maintenance similar to PBS-treated animals. Similar tolerability assessments were described in Ostergaard et al., Nucleic Acids Res., 2013 November, 41(21), 9634-9650 and Southwell et al., Mol Ther., 2014 December, 22(12), 2093-2106.

[0233] At the end of the study, the rats were sacrificed and tissues were collected. Histopathology was performed on sections of cerebellum using calbindin stain. Purkinje cell loss was observed in calbindin stained cerebellum sections as indicated in the table below. Cerebellum and spinal cord were also evaluated using an antibody specific for modified oligonucleotides. Animals demonstrating no oligonucleotide uptake were excluded from histopathology analysis. Histology was not completed for animals that were sacrificed early due to adverse events. Additionally, cortical GFAP, a marker of astrogliosis (Abdelhak, et al., Scientific Reports, 2018, 8, 14798), was measured using RT-PCR, and average elevations>2-fold are noted below.

TABLE 49
Long-term tolerability in rats at 3 mg dose

| | | Purkinje cell | Cortex GFAP |
|---|---|---|---|
| | Adverse event onset, | loss (# animals | mRNA |
| Compound | weeks post-treatment, | with loss/# | >2-fold |
| Number | individual animals | animals tested) | PBS Control |
| PBS | No | Not observed | N/A |
| 396442 | 6, 6, 2 | 2/3 | Yes |
| 819735 | 4, 6, 6, — | 1/4 | Yes |
| 1263789 | —, —, — | 0/3 | No |
| 1287717 | —, —, —, —, —, —, —, — | 0/8 | No |
| 1287745 | —, —, —, —, —, —, — | 0/7 | No |
| 1358996 | —, —, —, — | 0/4 | No |
| 1263783 | —, —, —, — | 0/4 | No |
| 1263785 | —, —, — | 0/3 | No |
| 1263787 | —, —, —, — | 0/4 | No |
| 1263800 | —, — | 0/2 | No |
| 1263802 | —, —, — | 0/3 | No |
| 1263806 | —, —, — | 0/3 | No |
| 1263808 | —, —, — | 0/3 | No |
| 1263810 | —, —, — | 0/3 | No |

### Example 8: Tolerability and Pharmacokinetics of Modified Oligonucleotides in Non-Human Primates, Single or Repeat Dosing

[0234] Cynomolgus monkeys are treated with modified oligonucleotides to determine the local and systemic tolerability and pharmacokinetics of the modified oligonucleotides. Each group receives either artificial CSF or modified oligonucleotide as a single intrathecal lumbar bolus dose injection (IT), or, for repeat-dosing groups, an IT bolus dose on day 1 of the study, followed by IT bolus doses at later time points. Tissues are collected 1 week after the final injection.

[0235] In a single dose study, monkeys are administered a single dose of modified oligonucleotide and tolerability is assessed. Representative doses for single-dose studies in adult cynomolgus monkeys include 1 mg, 3 mg, 7 mg, and 35 mg.

[0236] In a repeat-dosing study, monkeys are administered an IT bolus dose on day 1 of the study, followed by weekly (e.g., days 8, 15, and 22 for a four-week study) or monthly (e.g., days 29, 57, and 84 for a 13 week study) IT bolus dosing. Representative doses for repeat-dose studies in adult cynomolgus studies include 1 mg, 3 mg, 7 mg, and 35 mg.

[0237] Assessment of tolerability is based on clinical observations, body weights, food consumption, physical and neurological examinations including sensorimotor reflexes, cerebral reflexes and spinal reflexes, coagulation, hematology, clinical chemistry (blood and cerebral spinal fluid (CSF)), cell count, and anatomic pathology evaluations. Complete necropsies are performed with a recording of any macroscopic abnormality. Organ weights are taken and microscopic examinations are conducted. Blood is collected for complement analysis. In addition, blood, CSF, and tissues (at necropsy) are collected for toxicokinetic evaluations.

[0238] Tolerability of modified oligonucleotides is analyzed in brain and spinal cord tissue by measuring Aif1 and Gfap levels in cynomolgus monkeys treated with the modified oligonucleotide or the control. Brain and spinal cord samples are collected and flash frozen in liquid nitrogen and stored frozen (−60° C. to −90° C.). At time of sampling, 2 mm biopsy punches are used to collect samples from frozen tissues for RNA analysis. Punches are taken from multiple brain and spinal cord regions.

### Example 9: Phase Ia Human Clinical Trial with Compound No. 1263789, 1287717, 1287745, or 1358996

[0239] Safety, tolerability, pharmacokinetics, pharmacodynamics and efficacy of modified oligonucleotide complementary to human SMN2 is evaluated in a clinical trial setting. Single and/or multiple doses of modified oligonucleotide are evaluated in patients with confirmed SMA, such as Type I SMA, Type II SMA, Type III SMA, or Type IV SMA.

[0240] Patient safety is monitored closely during the study. Safety and tolerability evaluations include: physical examination and standard neurological assessment (including fundi), vital signs (HR, BP, orthostatic changes, weight), ECG, AEs and concomitant medications, Columbia Suicide Severity Rating Scale (C-SSRS), CSF safety labs (cell counts, protein, glucose), plasma laboratory tests (clinical chemistry, hematology), and urinalysis.

[0241] Efficacy evaluations are selected that are age and Type appropriate and include, for example, the Hammersmith Motor Function Scale-Expanded (HFMSE), which is a reliable and validated tool used to assess motor function in children with SMA; the Pediatric Quality of Life Inventory (PedsQL™) Measurement 4.0 Generic Core Scale; the Pediatric Quality of Life Inventory 3.0 Neuromuscular Modules; the Compound Muscle Action Potential (CMAP); the MotorUnit Number Estimation (MUNE); the Upper Limb Module (ULM); and the 6-Minute Walk Test (6MWT) (Darras, et al., Neurology, 2019, 92: e2492-e2506).

### Example 10: Design of Modified Oligonucleotides Complementary to a Human SCN1A Nucleic Acid

[0242] Modified oligonucleotides complementary to a human SCN1A nucleic acid are designed and synthesized as indicated in Table 50 below.

[0243] The modified oligonucleotides in Table 50 are 18, 19, or 20 nucleosides in length, as specified. The modified oligonucleotides comprise 2′-MOE sugar moieties, as specified. The sugar motif for each modified oligonucleotide is provided in the Sugar Motif column, wherein each ‘e’ represents a 2′-MOE sugar moiety. The intermucleoside linkage motif for each modified oligonucleotide is provided in the Intermucleoside Linkage Motif column, wherein each ‘s’ represents a phosphorothioate intemnucleoside linkage, and each ‘o’ represents a phosphodiester intermucleoside linkage. Each cytosine is a 5-methyl cytosine.

[0244] Each modified oligonucleotide listed in Table 50 below is 100% complementary to SEQ TD NO: 2 (the complement of GENBANK Accession No. NC_000002.12 truncated from nucleotides 165982001 to 166152000), unless specifically stated otherwise. “Start site” indicates the 5′-most nucleoside to whichthe modified oligonucleotide is complementary in the target nucleic acid sequence. “Stop site” indicates the 3′-most nucleoside to which the modified oligonucleotide is complementary in the target nucleic acid sequence.

TABLE 50
2′-MOE modified oligonucleotides with mixed
PS/PO internucleoside linkages

| | | | Inter- | | | |
|---|---|---|---|---|---|---|
| | Nucleo- | | nucleo- | SEQ | SEQ | |
| | base | | side | ID | ID | |
| | Se- | Sugar | Linkage | No: | No: | |
| | quence | Motif | Motif | 1 | 1 | SEQ |
| Compound | (5′ to | (5′ to | (5′ to | Start | Stop | ID |
| Number | 3′) | 3′) | 3′) | Site | Site | No. |
| 1472459 | AGTTGGA | eeeeeee | soossss | 144708 | 144725 | 64 |
| | GCAAGAT | eeeeeee | sssssss | | | |
| | TATC | eeee | sss | | | |
| 1472453 | AGTTGGA | eeeeeee | sososss | 144708 | 144725 | 64 |
| | GCAAGAT | eeeeeee | sssssss | | | |
| | TATC | eeee | sss | | | |
| 1472454 | AGTTGGA | eeeeeee | sosssos | 144708 | 144725 | 64 |
| | GCAAGAT | eeeeeee | sssssss | | | |
| | TATC | eeee | sss | | | |
| 1472455 | AGTTGGA | eeeeeee | sosssss | 144708 | 144725 | 64 |
| | GCAAGAT | eeeeeee | ossssss | | | |
| | TATC | eeee | sss | | | |
| 1472460 | AGTTGGA | eeeeeee | sssooss | 144708 | 144725 | 64 |
| | GCAAGAT | eeeeeee | sssssss | | | |
| | TATC | eeee | sss | | | |
| 1472462 | AGTTGGA | eeeeeee | sssssss | 144708 | 144725 | 64 |
| | GCAAGAT | eeeeeee | oosssss | | | |
| | TATC | eeee | sss | | | |
| 1472463 | AGTTGGA | eeeeeee | sssssss | 144708 | 144725 | 64 |
| | GCAAGAT | eeeeeee | ssoosss | | | |
| | TATC | eeee | sss | | | |
| 1472464 | AGTTGGA | eeeeeee | sssssss | 144708 | 144725 | 64 |
| | GCAAGAT | eeeeeee | ssssoos | | | |
| | TATC | eeee | sss | | | |
| 1472456 | AGTTGGA | eeeeeee | sosssss | 144708 | 144725 | 64 |
| | GCAAGAT | eeeeeee | ssossss | | | |
| | TATC | eeee | sss | | | |
| 1472457 | AGTTGGA | eeeeeee | sosssss | 144708 | 144725 | 64 |
| | GCAAGAT | eeeeeee | ssssoss | | | |
| | TATC | eeee | sss | | | |
| 1472458 | AGTTGGA | eeeeeee | sosssss | 144708 | 144725 | 64 |
| | GCAAGAT | eeeeeee | sssssss | | | |
| | TATC | eeee | oss | | | |
| 1472466 | AGTTGGA | eeeeeee | ssossss | 144708 | 144725 | 64 |
| | GCAAGAT | eeeeeee | sssssss | | | |
| | TATC | eeee | oss | | | |
| 1472467 | AGTTGGA | eeeeeee | ssssoss | 144708 | 144725 | 64 |
| | GCAAGAT | eeeeeee | sssssss | | | |
| | TATC | eeee | oss | | | |
| 1472461 | AGTTGGA | eeeeeee | sssssoo | 144708 | 144725 | 64 |
| | GCAAGAT | eeeeeee | sssssss | | | |
| | TATC | eeee | sss | | | |
| 1472468 | AGTTGGA | eeeeeee | sssssso | 144708 | 144725 | 64 |
| | GCAAGAT | eeeeeee | sssssss | | | |
| | TATC | eeee | oss | | | |
| 1472472 | AGTTGGA | eeeeeee | sssssss | 144708 | 144725 | 64 |
| | GCAAGAT | eeeeeee | sosssso | | | |
| | TATC | eeee | sss | | | |
| 1472469 | AGTTGGA | eeeeeee | sssssss | 144708 | 144725 | 64 |
| | GCAAGAT | eeeeeee | sosssss | | | |
| | TATC | eeee | oss | | | |
| 1472470 | AGTTGGA | eeeeeee | sssssss | 144708 | 144725 | 64 |
| | GCAAGAT | eeeeeee | sssosss | | | |
| | TATC | eeee | oss | | | |
| 1472473 | AGTTGGA | eeeeeee | sssssss | 144708 | 144725 | 64 |
| | GCAAGAT | eeeeeee | ssssoso | | | |
| | TATC | eeee | sss | | | |
| 1472471 | AGTTGGA | eeeeeee | sssssss | 144708 | 144725 | 64 |
| | GCAAGAT | eeeeeee | sssssos | | | |
| | TATC | eeee | oss | | | |
| 1472465 | AGTTGGA | eeeeeee | sssssss | 144708 | 144725 | 64 |
| | GCAAGAT | eeeeeee | sssssso | | | |
| | TATC | eeee | oss | | | |
| 1472452 | AAGTTGG | eeeeeee | ossssss | 144707 | 144726 | 65 |
| | AGCAAGA | eeeeeee | sssssss | | | |
| | TTATCC | eeeeee | sssso | | | |
| 1472451 | AGTTGGA | eeeeeee | sssssss | 144707 | 144725 | 66 |
| | GCAAGAT | eeeeeee | sssssss | | | |
| | TATCC | eeeee | ssso | | | |
| 1472450 | AAGTTGG | eeeeeee | ossssss | 144708 | 144726 | 67 |
| | AGCAAGA | eeeeeee | sssssss | | | |
| | TTATC | eeeee | ssss | | | |

### Example 11: Activity and Tolerability of Modified Oligonucleotides Complementary to SCN1A in Wild-Type Mice Treatment

[0245] Modified oligonucleotides described in Table 50 were tested in wild-type female C57/B16 mice to assess the activity and tolerability of the oligonucleotides. Wild-type female C57/B16 mice each received a single ICV dose of 700 μg of modified oligonucleotide as listed in the table below. Each treatment group consisted of 3 mice. A group of 4 mice received PBS as a negative control.

### Activity

[0246] To confirm splice-modulating activity of the modified oligonucleotides of Table 50, eight weeks post treatment, mice were sacrificed and RNA was extracted from cortical brain tissue for quantitative real-time RTPCR analysis of SCN1A RNA using mouse primer probe set RTS48951 (forward sequence CCCTAAGAGCCTTATCACGATTT, designated herein as SEQ ID NO: 23; reverse sequence GGCAAACCAGAAGCACATTC, designated herein as SEQ ID NO: 24; probe sequence AGGGTGGTTGTGAATGCCCTGTTA, designated herein as SEQ ID NO: 25) to measure the amount of SCN1A RNA that excludes the mouse form of a nonsense mediated decay (NMD)-inducing exon NIE-1 (NIE-1⁻) and primer probe set RTS48949 (forward sequence AGCCCTTTATTATGGGTGGTT, designated herein as SEQ ID NO: 20; reverse sequence CCAGAATATAAGGCAAACCAGAAG, designated herein as SEQ ID NO: 21; probe sequence TGGATGGAATTGCTCCTAACAGGGC, designated herein as SEQ ID NO: 22) to measure the amount of SCN1A RNA that includes the mouse form of NIE-1 (NIE-1⁺). SCN1A RNA is presented as % of the average of the PBS control (% control), normalized to mouse GAPDH. Mouse GAPDH was amplified using primer probe set mGapdh_LTS00102 (forward sequence GGCAAATTCAACGGCACAGT, designated herein as SEQ ID NO: 29; reverse sequence GGGTCTCGCTCCTGGAAGAT, designated herein as SEQ ID NO: 30; probe sequence AAGGCCGAGAATGGGAAGCTTGTCATC, designated herein as SEQ ID NO: 31). As shown in Table 51 below, the compounds demonstrated activity in this assay.

TABLE 51
Effect of modified oligonucleotides on amount of mouse SCN1A
excluding NIE-1 (NIE-1⁻) and the amount of mouse SCN1A
RNA including (NIE-1⁺) in wildtype mice, single dose

| | CORTEX | |
|---|---|---|
| Compound | NIE-1⁻ | NIE-1⁺ |
| No. | % control | % control |
| PBS | 100 | 100 |
| 1472450 | 154 | 8 |
| 1472451 | 169 | 3 |
| 1472452 | 171 | 9 |
| 1472453 | 158 | 2 |
| 1472454 | 139 | 8 |
| 1472455 | 156 | 4 |
| 1472456 | 170 | 4 |
| 1472457 | 178 | 2 |
| 1472458 | 197 | 4 |
| 1472459 | 199 | 12 |
| 1472460 | 178 | 2 |
| 1472461 | 185 | 5 |
| 1472462 | 192 | 6 |
| 1472463 | 197 | 4 |
| 1472464 | 198 | 2 |
| 1472465 | 175 | 4 |
| 1472466 | 162 | 1 |
| 1472467 | 169 | 4 |
| 1472468 | 169 | 2 |
| 1472469 | 148 | 4 |
| 1472470 | 145 | 4 |
| 1472471 | 150 | 3 |
| 1472472 | 150 | 4 |
| 1472473 | 152 | 1 |

### Tolerability

[0247] Modified oligonucleotides described in Table 50, and Comparator compound 1367010, were tested in wild-type female C57/B16 mice to assess the tolerability of the oligonucleotides. Comparator compound 1367010, previously described in WO 2019/040923 (incorporated herein by reference) as Compound Ex 20X+1 has a nucleobase sequence of (from 5′ to 3′) AGTTGGAGCAAGATTATC (SEQ ID NO: 64), wherein each nucleoside comprises a 2′-MOE sugar moiety and each internucleoside linkage is a phosphorothioate internucleoside linkage. Wild-type female C57/B16 mice each received a single ICV dose of 700 μg of modified oligonucleotide as listed in Tables 52 and 53 below.

[0248] Each treatment group for each of the modified oligonucleotides in Table 51 below consisted of 3 mice. The treatment group for Comparator compound 1367010, shown in Table 52 below, consisted of 4 mice. A group of 4 mice received PBS as a negative control for each experiment. At 3 hours post-injection, mice were evaluated according to seven different criteria. The criteria are (1) the mouse was bright, alert, and responsive; (2) the mouse was standing or hunched without stimuli; (3) the mouse showed any movement without stimuli; (4) the mouse demonstrated forward movement after it was lifted; (5) the mouse demonstrated any movement after it was lifted; (6) the mouse responded to tail pinching; (7) regular breathing. For each of the 7 criteria, a mouse was given a subscore of 0 if it met the criteria and 1 if it did not (the functional observational battery score or FOB). After all 7 criteria were evaluated, the scores were summed for each mouse and averaged within each treatment group.

[0249] As shown in the data provided in Tables 52 and 53 below, the compounds described in Table 50 were more tolerable than comparator compound 1367010 in this assay.

TABLE 52
Tolerability scores in mice

| Compound | FOB 3 |
|---|---|
| No. | hour |
| PBS | 0 |
| 1472450 | 3.33 |
| 1472451 | 3.00 |
| 1472452 | 2.33 |
| 1472453 | 1.00 |
| 1472454 | 2.33 |
| 1472455 | 1.33 |
| 1472456 | 1.00 |
| 1472457 | 2.67 |
| 1472458 | 1.33 |
| 1472459 | 1.67 |
| 1472460 | 1.67 |
| 1472461 | 2.00 |
| 1472462 | 2.67 |
| 1472463 | 2.67 |
| 1472464 | 2.00 |
| 1472465 | 3.67 |
| 1472466 | 2.67 |
| 1472467 | 3.67 |
| 1472468 | 3.33 |
| 1472469 | 2.67 |
| 1472470 | 2.67 |
| 1472471 | 3.00 |
| 1472472 | 2.67 |
| 1472473 | 3.33 |

TABLE 53
Tolerability scores in mice

| Compound | Dose | FOB |
|---|---|---|
| No. | (μg) | 3 hour |
| PBS | N/A | 0 |
| 1367010 | 700 | 7 |

### Example 12: Tolerability of Modified Oligonucleotides Complementary to Human SCN1A in Mice, Long-Term Assessment

[0250] Long-term tolerability may be assessed in surviving mice. Each animal is weighed and evaluated weekly by a trained observer for adverse events. Adverse events are defined as neurological dysfunction not typical in PBS-treated control animals, including, but not limited to: abnormal limb splay, abnormal gait, tremors, abnormal respiration, paralysis, and spasticity. Similar tolerability assessments are described in Ostergaard et al., Nucleic Acids Res., 2013 November, 41(21), 9634-9650 and Southwell et al., Mol Ther., 2014 December, 22(12), 2093-2106.

[0251] At the end of the study, the mice are sacrificed and tissues are collected. Histopathology is performed on sections of cerebellum using calbindin stain. The calbindin stained cerebellum sections may be evaluated for Purkinje cell loss. Cerebellum and spinal cord may also be evaluated using an antibody specific for modified oligonucleotides. Animals demonstrating no oligonucleotide uptake are excluded from histopathology analysis. Histology is not completed for animals that are sacrificed early due to adverse events. Additionally, cortical GFAP, a marker of astrogliosis (Abdelhak, et al., Scientific Reports, 2018, 8, 14798), may be measured using RT-PCR, and average elevations>2-fold are noted.

### Example 13: Tolerability of Modified Oligonucleotides Complementary to Human SCN1A in Rats, Long-Term Assessment

[0252] In separate studies run under the same conditions, modified oligonucleotides described in Table 50 and comparator compound 1367010 were tested in Sprague Dawley rats to assess long-term tolerability. Sprague Dawley rats each received a single intrathecal (IT) delivered dose of 3 mg of oligonucleotide or PBS. Beginning 1-week post-treatment, each animal was weighed and evaluated weekly by a trained observer for adverse events. Adverse events are defined as neurological dysfunction not typical in PBS-treated control animals, including, but not limited to: abnormal limb splay, abnormal gait, tremors, abnormal respiration, paralysis, and spasticity. The onset of the adverse event is defined as the week post-dosing when the dysfunction was first recorded. If no adverse event was achieved, there is no onset (−). If the animal died prior to 1-week due to acute toxicity, long term adverse effects could not be verified, and such cases are marked with a ‘Ø’ symbol. Similar tolerability assessments are described in Ostergaard et al., Nucleic Acids Res., 2013 November, 41(21), 9634-9650 and Southwell et al., Mol Ther., 2014 Dec., 22(12), 2093-2106.

[0253] At the end of the study, the rats are sacrificed and tissues were collected. Histopathology was performed on sections of cerebellum using calbindin stain. The calbindin stained cerebellum sections were evaluated for Purkinje cell loss. Purkinje cell loss was observed in calbindin stained cerebellum sections as indicated in the table below. Cerebellum and spinal cord were also evaluated using an antibody specific for modified oligonucleotides. Animals demonstrating no oligonucleotide uptake were excluded from histopathology analysis. Histology was not completed for animals that were sacrificed early due to adverse events. In cases where purkinje cell loss could not be evaluated due to death of mice in less than a week post treatment, the values are indicated as ‘N/A’. Additionally, cortical GFAP, a marker of astrogliosis (Abdelhak, et al., Scientific Reports, 2018, 8, 14798), was measured using RT-PCR, and average elevations>2-fold are noted below. In cases where GFAP levels could not be evaluated due to death of mice in less than a week post treatment, the values are indicated as ‘N/A’.

TABLE 54
Long-term tolerability in rats at 3 mg dose

| | | Purkinje | |
|---|---|---|---|
| | | cell loss | |
| | Adverse | (# | Cortex |
| | event onset, | animals | GFAP |
| | weeks post- | with | mRNA |
| | treatment, | loss/# | >2-fold |
| Compound | individual | animals | PBS |
| Number | animals | tested) | Control |
| PBS | —, —, —, — | 0/4 | 100 |
| 1367010 | Ø, Ø, Ø, Ø | N/A | N/A |
| 1472450 | —, —, —, — | 0/4 | 151 |
| 1472451 | —, 7, —, —, | 2/4 | 128 |
| 1472452 | —, —, 7, —, | 0/4 | 112 |
| 1472453 | —, —, —, — | 1/4 | 100 |
| 1472454 | —, —, —, — | 0/4 | 136 |
| 1472455 | —, —, —, — | 0/4 | 116 |
| 1472456 | —, —, —, 7 | 0/4 | 140 |
| 1472457 | —, —, —, — | 0/4 | 135 |
| 1472458 | —, —, —, 3 | 0/4 | 118 |
| 1472459 | —, —, —, — | 0/4 | 129 |
| 1472460 | —, —, —, — | 1/4 | 130 |
| 1472461 | —, —, —, — | 0/4 | 130 |
| 1472462 | —, —, —, — | 0/4 | 130 |
| 1472463 | —, —, —, — | 0/4 | 118 |
| 1472464 | —, —, —, — | 0/4 | 111 |
| 1472465 | —, —, —, — | 0/4 | 119 |
| 1472466 | 7, —, 7, 7 | 1/4 | 159 |
| 1472467 | —, —, —, — | 0/4 | 120 |
| 1472468 | —, —, — | 0/3 | 148 |
| 1472469 | —, —, —, — | 0/4 | 123 |
| 1472470 | —, —, —, — | 0/4 | 150 |
| 1472471 | —, —, —, — | 0/4 | 142 |
| 1472472 | —, —, —, — | 0/4 | 125 |
| 1472473 | —, —, —, — | 0/4 | 115 |

### Example 14: Tolerability of Modified Oligonucleotides Complementary to Human SCN1A in Rats, 3 Hour Study

[0254] Modified oligonucleotides described above were tested in rats to assess the tolerability of the oligonucleotides. Sprague Dawley rats each received a single intrathecal (IT) dose of 3 mg of oligonucleotide listed in the table below. Each treatment group consisted of 4 rats. A group of 4 rats received PBS as a negative control. At 3 hours post-injection, movement in 7 different parts of the body were evaluated for each rat. The 7 body parts are (1) the rat's tail; (2) the rat's posterior posture; (3) the rat's hind limbs; (4) the rat's hind paws; (5) the rat's forepaws; (6) the rat's anterior posture; (7) the rat's head. For each of the 7 different body parts, each rat was given a sub-score of 0 if the body part was moving or 1 if the body part was paralyzed (the functional observational battery score or FOB). After each of the 7 body parts were evaluated, the sub-scores were summed for each rat and then averaged for each group. For example, if a rat's tail, head, and all other evaluated body parts were moving 3 hours after the 3 mg IT dose, it would get a summed score of 0. If another rat was not moving its tail 3 hours after the 3 mg IT dose but all other evaluated body parts were moving, it would receive a score of 1. Results are presented as the average score for each treatment group.

[0255] Comparator compound 1367010, described hereinabove, was tested in Sprague Dawley rats to assess the acute tolerability of the oligonucleotides.

TABLE 55
Tolerability scores in rats (n = 4) at 3 mg dose

| Compound | 3 hr. |
|---|---|
| No. | FOB |
| PBS | 0.00 |
| 1367010 | 6.00 |

TABLE 56
Tolerability scores in rats (n = 4) at 3 mg dose

| Compound | 3 hr. |
|---|---|
| No. | FOB |
| PBS | 0.00 |
| 1472450 | 1.00 |
| 1472451 | 2.00 |
| 1472452 | 2.75 |
| 1472453 | 2.25 |
| 1472454 | 3.00 |
| 1472455 | 1.50 |
| 1472456 | 2.25 |
| 1472457 | 2.25 |
| 1472458 | 3.00 |
| 1472459 | 2.25 |
| 1472460 | 2.75 |
| 1472461 | 2.25 |
| 1472462 | 2.25 |
| 1472463 | 1.50 |
| 1472464 | 1.25 |
| 1472465 | 2.25 |
| 1472466 | 3.00 |
| 1472467 | 2.25 |
| 1472468 | 4.00 |
| 1472469 | 1.75 |
| 1472470 | 3.00 |
| 1472471 | 2.25 |
| 1472472 | 2.25 |
| 1472473 | 0.00 |

The application's sequence listing, which the Patent Office published only in electronic form, follows.

SEQUENCE LISTING (121 sequences)

SEQ ID NO: 1 - DNA, 28070 bp, Homo sapiens
  source 1..28070: mol_type = genomic DNA
ccacaaatgtgggagggcgataaccactcgtagaaagcgtgagaagttactacaagcggtcctcccggccaccgtactgttccgctcccagaagccccgggcggcggaagtcgtcactcttaagaagggacggggccccacgctgcgcacccgcgggtttgctatggcgatgagcagcggcggcagtggtggcggcgtcccggagcaggaggattccgtgctgttccggcgcggcacaggccaggtgaggtcgcagccagtgcagtctccctattagcgctctcagcacccttcttccggcccaactctccttccgcagcctcgggacagcatcaagtcgatccgctcactggagttgtggtccgcgtttttctacgtcttttcccactccgttccctgcgaaccacatccgcaagctccttcctcgagcagtttgggctccttgatagcgttgagtggaggccctgccgcgacttggcagtagcttattttgttcactcctctctggctggtgtgggggaggtgggggcattaggccagggtgaagcaggggaaccacttaggagtctgttaagatgatctgaacttcagaacaagatgttattaacagagtgaaagtatttggattctgggtatattttgaaatcggaggcaacaggtttttcagatagattcgataacggaggttatcctgaatagttgaaaagataaagttgccttttgctgaggtgggaaagagaagattgccagtagagcaggtttctcaggagttcagtcttgggcatagcatggtaggggtgaatttggctggagtgagttggagagtaggagaagagaaatccaaggcaacatttgaccagcctgggcaacatagtgtgactccgagtctgcaaaaattagacgggtgttgtggtgcgcgtctgtggtctcagctacctggaaggttcaggccttggaaggctcagggaggtggaggctgcagtgatctgtgattgcgcctctgcactccagcctgggcgacagagccagaccctgtcttaaaacaaaataaacggccgggcgcggtggctcaagcctgtaatcccagcactttgggaggccgaggcggccggatcacaaggtcaggagatcgagaccatcctggctaacacggtgaaaccccgtctctactacaaatacaaaaaattagccgggcgtggtgacgggcgcctgtagtcccagctactcgggaggctgaggcaggagaatgtcatgaagccgggaggcggagcttgcagtgagccgagatcgcgccactgcactccagcctgggcgatagagcaagactccgtctcaaataaataaataaataaataaataaataataaaaacatcggtaggcatatttcaaggaattctatttaaaaaaaatttttttagagacaagttcgctctctgtggcccaggctggagtacagtggcatgatcctagcccatggcagcgttgatctcttggcctcaagcgaccctcctttggagtcgctgggcctaaaggagtgagccaccacgaaattttattataaatggagggtagagaaattgggcaataaatggagggggaagtgagttaagaggaattttaattatgtgtgtgtggttttaaaagaggggggtcttgctctgttgcccaggctgctggggtgccagtggcgcaatcatgaatcactacagccttggactcctggcctcaagctatcctcccacctctgcctcccaaagtactgggattactagtgtgagccactgcactaagataggagcaacatgtttcagcatgtttgtgggttgataggaaagatgagaatgggaaagttgatgtcggaaagaagacaatggctagagcaatgtcctagagtaggtaagaagggatggatttggcctttgttggaaacattagcggttcttttggtgacagctatatagttaacacatctatgatacgtgaatgggcagataggatggcaggagattttgaaagttctcttgattcttactgttctcttagtgaaagaagcaaggttatcagctagaagctgggatgggagaggaaagagaagatgggaagtagatagttctttagaagagtgggcaagggttggactagggaagtttagtggaaatattgctaggcaacataaagagcctacttgagattcgtggtcatgagttgaaggagaccagacagcaagattgtgtatgagggcacccacagagtaaatggagagttgaaattaatgcagttgtgattttaccacgtggatatgaagaagtgagggggagaagtacaaaggagttctcttaatgattgaccatggaatttaagctggctaagaaaggaagtgagaggccgggcgcggtggctcacgcctgtaatcccagcactttgggagactgaggtgggtggattacctgaggtcaggagtttgagaccaacctggccgatatggcgaaaccccatctctaataaaaatacagaaaaattagccgggaatggtggcaggtgcctgtaatcccagctactcaagaggctgtggcaggagtatcccttggacccaggaggtggaggttgcagtgagccgagatcacgccactgtactccagcctggacgatatagtgagacttcacctcaaaaaaaaaaaaaaagaaaggaagtgaggattttaagaccctgagagacagtttaaaaagtgggaggatcggccgggcgctgtggctgacacctgtaatcccagcactttgggaggccgagttgggcagatcacaaggtcaggagttcgagaccagcctggccaatatggtgaaaccttgtctctactaaaaatacaaaaattagccgggcatggtgtcacgtgtctataatcccagctactcgggaggctgaggcagaaaaattgcttgaacctgggaggcagaggttgcagacagctgagatcactccattgcactccagcctgggcaacaagagcaaaactttgtctttaaaaaaaaaaaaaaaaaaagaatacaaaaattagccgggcgtggtggcgcgtgcctataatcccagctacttgggaggctgaggcaggagaatcagttgaacacgggaggcgaggtttgcagtgagccgagattgcgccactgcactccagcctgggcgacagagcaggactcctcttggaaaaaaaaaattagctgggcatggtggcaggtgcctgtagtctcagctactagggaggctgaggcaggaaaatcacttgaacccgggatgtggagtttgcagtgacccgagatcgtgccactgtactccatcctgggcgacaaaatgagactctgcctcaaaaaaaaaaaaaaaaaaaagtgggaggatcaatgtactgccagtcctaatgaagtggaatgattgtccccatcaaatcactagtaggagtaagttgcagagcctagaaggtgatggttaagagagtgggattcttgaaactgcatttatggagaggttgtggttattggttataataaataaatacagttgaagtgagtgagtagctgagatttggggatgtatcagttcattcttacactgctacaaagacatacctgagaccaggtatttataaagataagaggtttaatcagctcacagttctgctgcctgtacaggcttctcttgtggaggcctaaggaaacttacagtcatggtggaaggtgaaggggaaacaagcacagtcttcacatggccagcaggagagagagagaagggggaagtgctacatactttaaaacaaccagatcttgtgagaacgcttatcaggaaacagcacttggggatggtgctaaatcattagaaatcacccccatgatccagtcgcctcctaccatgcccacctccaacactggggatcacaattcagcatgagatttgggtaggaacacagagctgcaccacatcagaggatgtacaagattgtggtggagaggagtttagagacctgcaaatatagggtaattgaagggatcatctacatggatatttaaatcaccaaaaattatgacaggagtagtgttggagagagaactgcgatgtaaacattaaggaatgaggaagagtgactcggtaggctgtaggtgactgcaataggaaacgataatagactgtgagtctggtgacaagattttccttctttctttttttccccccccccgagacagggcctctttttgttgcccaggtgggagtgcagtggcgcgatcacggctcactacaacctcctcccaagctcaagggattctcccacttcagcctctcaagtagctggaactacaggtgctgaccaccatgcctggctactttttgtcaggattttcaaggctgggaattttgagaggggaatggaggagaataatctgaaagtgcaagtaaggagcagggaagatttcttttttcttttttttttttttttttgagtcggagtctggctcagtcgcccaggctggagtgcagtggcgagatctccgctcactgcaagctccgcctcccgtgttcacgccattctcctccttcagcctcccgagtagctgggactacaggcgcccgccaccacgcccagctaattgtttttttgtatttttagtagagacggggtttcaccgtgttagccaggatggtctcaatctcctgactttgtgatccgcccaccccggcctcccaaagcgcttgggattacaggcgtgagccaccgcgccagccagagcagggaagatttcttccccacatctccagtaggtacagtgatatgaagtgtgtggaggagaaaagaggaaacatctatcatttgagatggctgcgaaaggaaaaggcatcctcagggagctagattttacttagagcaagaaatgaagggatgattcagaggttaaaagagtggattttatgaattactcaagggagcacagtggaagtttcaggaagtggtaggagaaggtagaagatggcagggtgttgggaataatttgagaaatctgagctactggaaatgactgagaatcagatataaaggcagtcctggtggtccgttctggctgccgttgctgtgtaacgaatctgccaaaacttagtggcttgaaacaacaaagaacattttattatctctcattgtttctgtgggttaggaatttgtgagagccgtgctgggcagttttcgtgcggctgtctcgtggttgcacctacatagttgctagagctacagtagctggggactgagcagctagggattggcaggctatctctttttttcatgtagtctcatgaagatttctttatgtggtttcaatgtgtgggctggtttggatttccttatagcatggtggcctcagttggattgctgttttgtgatccttttcatccctccttgtcctgtccccagacaaccactgatctactttctgtcaccatagattagcctgcatttttaagaatttttataaacgtggaatgatagagtaccttttttgtcacgtttcttttatttatcatagctattttgattttcatccattttattgctgagtagtatcccattgcatgtatatactatactgtattcattcgcttgcttgtgaacatttgggctttttccagtttgggactgttaacaagtagagccactatgaatattagtgtataagacttcatatagccaaggctggcagatcgcttgagcccaggagtttgagaccagcctgggaaacatggtgaaacctctatttttattttaaaatcaaaaattaaaaattttctataaaaaattttaaagaagactttgtatagacatacgctttcatttttcttgagtgaatacttaggtctcagggtagatgtattttaagtctttaaggagctgtcaaactcttcctcaaagtggtggttgtaccatgttactttttaatataacagagattaattgagcaaagaaaaattcaaaagttggacagcccccacaactaaataggttcagaacagctcccccattttgcattttgaccagcaatgtatgaaagttccatttgctcagtgtccctgcaaacacctggtatggtcagtctttttaattttaggcattataatagatatagtggcttcttgtgattttaattagcatttcctaatgaccagtgctgctgttgatcatttcatgagtgtatttgccatccgtatatcttttttggtgaagtgtctattcaaatcatttgggttttttttttttttgttttttttttttggagacagtgtctcactctgtcacccaggctgttgtgcagtggtgcaatcacacagcctactgcagcctccacctcctgcgctcagtcttcttgtctcagccttctgagtagctgaaattacgagcacacgccacaatgcctggctaattttttaaaattttgtagaaacaaggtctcattatgttgcctgggcttgtcgtgaactcctgggctcaagcaatcttcctgcctcagcctcccaaagattgggattgcaagtatgagccactgcacccggccaacttacccatcttttaattgaatttttttgttgttgaggtttgagagttcttcatgtttgctgggtacaatatctttatcagataggtaacttgcatgtattttctcccggtttacactttggtttttcattttgttaacaacgtctttttaagaacagaaaatcttaattttgctgaaatctaatttttcagttttttctttgatggttttgagagaggaggtaaaaaaagactaggtaagccgatagttagacagagtcctcggtagaacttcccttctaacaaaaagcagcccaagaaatcacttctcttctaacaaggagcagcctggaagatcgggctgtaaacatgtataaggaagcagctctggcacagagggggagcttcctgggtaatcagcaagcttcacatacgtaaggtgggtatgtgaagtaaacacagtatgtgaagtaaacacagtggaccttagtacatactcagataaggaagctggaagcttgcatgttgtgagttgttggggttgcctgcagctgcacggagagaaaggggtacctggggccaggcatgtccaccatggtggctccacctccccttatttagcacatgcacaataggaaagagataagcaatgtggagtagctcaggccaaggacctgcctgcataataaaaggttggggtgggggatgccagagattcacgctctgtgcagatggcaacacctggtcctaactggttttttgctccctatgtgtagataagctacccccttcccattagctcatttataaaaatgcttgcatttcactgtggaatgggaactcttttcaggacctctctctgcaggagagagctagtctctttcttttgcctattaaacttctgctctagcctcacacccttggtgtgtcagcgtccttgatttcctcagcgtgagaccaagaacctcgggtgccaccccaggcaacaaggccatttcagtttgttcttttgttataggcaatccatgatcacagatttttctctcttttttttttttacacagtttagagttttagttttacacttaggtctgtaatccattttgtattaattcttatatgtggctcagtgtaggtggaaatttggtttgtttttgcataaggatttccaatagttttaccaccatttcttgaaactactatgctttctctattaaaccacatttgtaactttagttaaaatcagtcacatatatcacagggctatttctgactctcaattctgttacattgtctattagtgtatattgatgtcagtactacacttttaattactattgcttcagggtatgtcttgtaaaccaaaaataaaattataggccccccccgcccctgcacaaccaactgaatggacccatcctctcagccaagggcattccaaaattaacctgaaaaactagttcaagccatgatgggaagggggagttggacatgtctcatcacaccctactaccttttggaattactgatagaacagactcttaaagtctgaaaagaaacatttacaacctaccctctctgaagcctgctacctgggagcttcatctgcatgataaaaccttggtctccacaaccccttatggtaacccaaacattcctttctgttgataataactctttcaactagttgccaattagaaaatctttaaatcttcctatgacctagaaacctccctacccccactttgagttgtcctgcctttcctgacagaactcatgtacatcttacatatattgattgatgcctcatgtctccctaaaatgtataaaacaaagctgtaccccaccaccttggggacatgtcatcaggacctcctgtggctgtgtcataggagcgtctttaactttggcaaaataaactttctaaattgattgaaacctgtcttagctacttctggtttacagtcttaaagttagataatgtaaattgtccagctttggtttatttttgtccttagtagttccatataaattttagaatcagcttttcaatttaatacactactttcctcttagatccacaattaaatatatttgatgctaacaattctgttttatgtttttcgttttttttttttgagacaagagtttcgctcttgttgcccaggctggagtgcagtggcgcgatcttggctcaccacaacctccacctcccaggttcaagcaattcttctgcctcagcctcccgagtagctgggattacaggcatgcgccaccacgcccggctaattttgtatttttagtagagacggggtttcaccatgttgatcaggctggtcttgaactcctgacctcaggtgatccacccacctcggcctcccaaagtgttgggattacaggcgtgaaccaccatgcctggccagttctgttatttttaaaacccaagtttccctggtcatatcttggttggatgaagcgtattttcaatagattaccctggaaaggctagtgagtacggtattcttctacattttagacttttcttagtcttgctacttcaaggacagctaggctgcatataaaattcttggctcatactttttccccataaatttctatgagaaagtctaatgataactgattttctttattttgtaacttagtctttttgcttagaggctctctgaggatgggagggggttcttcctcccatccctaggaatttttcttttttttaaattcctaatcactagaccaccaggaagattgtttgttttgttttgtttttattcttcagggaccccatttatacatacgttaaataaatactgtttgccaatgtatcaaccattttgcttcttatttatttttgttcctttggttctttttcatggctttgctttggtgctccttagattttcagtcagatgtatttgtccttgggtaccttgtaatcagtattaccttttcttctgtcgctttgttttctgttcgttttgaaattacttgtttcctggtctggcaataacagttgagatatgaggagtttgagctgccatctgtctatgtatcttgctttaagactgcactcttctattgatatcactggccttgattttgtgatttctttatttcttcaggaccacccttcattttctactgtttgcttcctttttttttgagatggagtctcactctgtcactcaggctggagtgcagtgatcttggctcattgcaacctctgcctcccgggttccagcaattctcctgcctcagcctcccaagtatctgggactacaggtgtgcaccaccatgcccggctaagttttgtatttttaatagagacggggttttgccacattggcaggctggtctcaaactcctgatgtcaagtgatccacccaccccacccacctctgcatcccaaagtgctgggattacaggaatgagctgccgtgcccagcctcccccctacccccctttttttctttcgagacagagattataggtgtgagccactggacccagcctgtttttattccttttaccaaatctccaaggaatatcttcccttccaagtgcgaatgtaaccttaagtcagttaacctctttgtgattacttttcttatctgcaaagtgacttaatgatcttaagtactttttttttttgagacagggtctcactgtcaccctggctggagtgcagtggcacgatctctgatctccactcactgcaatctcctcttccctggttcaagcggccctcccaccttagccttctgggtagctgggactacagatgtgaaccaccacgcccagctaatttttgtactttttgtagagatggggttttgccatgttgcccaggctgggattattaagtactttttatcatacagcaagattgacattttatattggaatacatttgtctctatataacggagattaacaggaaaatgacaagcctgggtgcggtggctcatgcctgtaatcccagcactttgggaggctgaggtgggaggatcacttgaggtcaggagttcgagaccagttttgccaagatgatgaaagcccatgtctactaaaaatacaaaaattagcccagcttgatggtgggcgcctataatcccagctatttgagagactgaggcaggagaatcacttgaacctgggcagcagaggttgcagtgagccgagatcatgccactgcactccagcctgggtggcatagcgagactcttgtctcaagagaaaacaaaacaaaacaaaaaaaaaacaggaaaatgacaaaaagtaatattacaactcagtgaattttataacaaacttttttggaattcattgactaatactataccaaatccaaaatactctctagtataccaaatccaactctaccctatagtataaattggattctatttggacttgtctcactaatccctcatacagtgtgttttattttttattgaagtaaaaaaatttgtcattttaaccatttttaagtatatagttcagtaatattaagtatgttcatgttgttgcgcaatagatcttcggaagtttttcgtcttgcaacctgaaactctacccattagcaaattcccatttctccttacacttagcccttggtaatcatcattcttttttttttttttttgagatggagttttactcttgttgcccaggctggagtgcaatggtgcaatctcgactcaccacaacctccgcctcccaggttcaagcaattctacctcagcctcccgagtagctgggattacagtcatgcaccaccacgcccggctaattttgtatttttagtagagaaggggtttctccatgttgaggctggtctcgaactcctgacctcaggtgatctgcccacctcggcctcccaaagtgctgggattacaggcgtgagccactgcgcctggcccattctttctaattctataaatttgactacttagttaccttacataaataaattcttatagttagtgttatttttgcttccatgccttttttgttgttgttcatgctcttacttggaatgcgttctattttgtctacctatgcacatcctgttgggttttttttttttttgggggttttttttgtttttttttgtttttttttcccagacaaggtctcaatttgttacccaggctggagtgcagcggcgccatctccactcactgcatcctcaacttcctgggcccaggtgatcctctcgcctcagcccctgcaggtagctgggactataggcatgtgccaccatgcccagctaaatttggtttttttgtttgtttgtttttgagacagagtctcactctgtcacccaggctggagtgcagtggcacaatctcagctcactgcaatctctgccgcccgggttcaagtgattctcctgcctcagcctcccaagcagctgggattacaggtgactgccaccacgccagctaagttttgtagttttagtagagatggggtttcaccttgttggccatgctggtctcgaactcctgacctcgtgatctgcctgcttctgcctcccaaagtgctggaattacaggcatgagccaccacgcccggccagaatttttgtatttttagtagacacaaggttcttaccctgttgcctaggctggtctggaagtcctggactcaagcaattcacctgccttggcctcccaaaatgctgggattacaagccaccatgcccggcctaaatcctgttgttttgttttgttttattttgttttgttttgttttgtttgttttttgagacagagtctcgctatgtctctcaggctgtagtgcagtggcgcgatcttggctcactgccacctctgcctcccaggttcaagtgattctcctgcctcagcctcccaagtagctgggattacaggcatgtgctactatgtccggctaatttttgtatttttagtagagacagggtttcaccatgttggccaggctggtctcgaactcctgacctcgtgatccacccacctcggccacccaaagtgctgggattacaggcgtgagtggtttttatttcttaggccggtttcctccatatgatcttgcagtagacattaatttctttcctttttaattaaaatactgtttgtatttcacattttgatgtttgttaagatttgttttatattgttttttgttttgtcttgtgtgatagtcttaaatccctagttagataataactggagagtaccatgtttctatatatctctcagtgacttgcacagtgctagcagatagtgctaaaaaattatttattattattattattttgttattgttgttgttgttgttagacagggtcttcctctgtcacccaggctagagggcaatgggatgatcatagcttactgcagcctccaacaactgggctcatgtaattctcctgcctcagcttcccaagtagctgggattacaggcatgagccaccatgtctggacaaaaatatttccaggtgcagtggctcatgcctgtaattcccacacttgggaggccgagcgaggctggaggatcacttgagcctaggagttcaagaccagcttggctaagatggcgagaccccgtccctacaaaaaattttaaaaactagccaggcatggtggcatgcacctatattcccaactactcagtgggctgaggtgggagggtcatttgaacacaggaatttgaggggagaaaaaaagaagagagaaagagaagtgaaggaaggaagaaaggaaggagggagggagagaagaaagaaacgaaagaaaggaaaagaaaaggaaggaaagaaaattggtaccaggaaagcaggaaagggaaatggaagtaaaaaaataataataataataaaatgaaaattggttagtcactattaacaatttgtatccttataatctggaaacattataatttcaaaagaaaaaatattctttggatcataggttctgaggtcagaacagcattcccgtagtctagatgaagtcaagttttatctgatcttaattgaaataaatatagctggccttgaacaaatctactcatggtatgtggataggaattaaattgtaggggcattcacttgatggcattcattcttagaacatttacctatgtctagcttttggagtaaagtcacataacctctaaccaggtaagtttcctgtggctttatttaggattttaaatactcattttcagtgtaattttgttatgtgtggattaagatgactcttggtactaacatacattttctgattaaacctatctgaacatgagttgtttttatttcttaccctttccagagcgatgattctgacatttgggatgatacagcactgataaaagcatatgataaagctgtggcttcatttaaggtatgaaatgcttgcttagtcgttttcttattttctcgttattcatttggaaaggaattgataacatacgataaagtgttaaagtacatgttattcagttttcattttgaagattagatggtagtatgagttagttaaatcaggtgatatcctcctttagaagttgatagcctatatatgtcatcctttgtggaggcaatttaaataaaatttaaaacatttattcctggctgggtatggtggctcactcctgtaatcccagcactttgagaggctgaggcgggtggatcacctgaggtcaggagtttgagaccagcctggccaacatggtgaaaccccgtctttactaaaaatacaaaaattagccaagcatggtggcacgtgcctgtaatcccagctgcttgggacactgaggcaggagaattgcttgaacctggggggcagaggttgcaatgattgcaccactgcactccagcctgggcgatagagtgagactccatctcagaaaacgaacaaacaatgtattccttttagtatttttacattgtatcaaactatggaagtcctctaattgagattaataagaaaaagacaatctgaattataattttaaacatttaacaagcatgtagtaaaataatgatgaagataaatagcattagtacagcaattaatatttgtagcatgctgacagtgctctgtgtgcgtttcatatattaaattactctaatcatcccaaatcctgtaagttgggtatcaattcaagtgttcctattgggtaggaatatacagttcttttaggaaatgtagtatggttctgtgtctcaaacaggacacttacacagttggccaacatcatcaccttctccattctctgagatgtttagtcttactgagcactaaatatgggtcatcaatagtccagactaccttgagcaaacaatagtccagactaccttgagcaaacagagcatatactcatacagtgtataaagagcaccaagcatacagatttcatgtctttctcatagttactcttgtaacatgagctaaagatcagacctctatgtcacctttgtaactgatttctagatttttttttttttttgagatggggtcttgccctgtcacccaggctggagtgtagtggcgtgatcatgcctcattggagccttcaactcatgagctcaaacaatcctcctacctcagcttcctgagtagttgggaccacaggtgtgtgccaccacacccagctcatttttgtattctttgtagagatgcagtctcaccctgttgcccacgctggcctggaactcctgagctcaaaagatccctccgccttgaccttccaaagtgctgggattacaagcatgaaccactgcacccggcctagatttttaaatgtgctttccagtatacactgaaactagaagtcgactaaagaattaccaagagaattctataaaatagagattgaaatggggctcgatgtgggatgggttggtgatattgcagggagaagtaatctgagtaaaggaggaaaagaactgatttgggaaaacgatagttttagtagtgagtttgagtatgaattaagttgagattgaatttgaattaagttgaggttgaatatgaattaagttgaggttgagtttgaggtatgaattaagatgtgaaattgatcattggaaatgttagattgagaaaagtcacagctggattaatagcttcagaagtgtgtttgcagacagttgcaactaaagtaataagaatagatggccttggccgggcgcggtggctcacgcctgtaatcccagtactttgggaggctgaggcgagcaaatcacgaggtcaggagttcaagaccagcctggcccacatggtgaaaccccgtctttattaaaaatacaaaaattagctgtgcacagtggtgcacgcctgtaatcccagctactcgggaggctgagacaggagaatcgcttgaacctgggaggtggaggttgcagtgagctgagatcagtgtgactgcactccagcccggtgacagagtgagactctgtgtaaaaaaataaaataaataaaataatggccgtaagcaagtaaagaaggatggccagctcttattgggaatgcctaaatctaaggcttgatcagaagtaatgaaaccgttggggccctacattgctatgacatccaaagggccatgaatatcaggaagaaagataattaacagggtctaatgttacagagaggttgagagcaaggagatttgattaaaagggtctttagagctgatgtcaggtgtatgatgcctttaagagcagtttttatagtgcagggggtggtcaaaagagaaaataggtgctttctgaggtgacggagccttgagactagcttatagtagtaactgggttatgtcgtgacttttattctgtgcaccaccctgtaacatgtacatttttattcctattttcgtagcatgctctaaagaatggtgacatttgtgaaacttcgggtaaaccaaaaaccacacctaaaagaaaacctgctaagaagaataaaagccaaaagaagaatactgcagcttccttacaacaggttattttaaaatgttgagatttaacttcaaaggatgtctcattagtccttatttaatagtgtaaaatgtctttaacttaagtgattagtacagtgtttctattgacatatacttatacaacttcaaaaacaactattaaattttctgttatttaggaacatgcatattagtcatgaaagtataaagaattagatgggaatgataaatgctaaaatcaggacatgtgttccatttgtgaatggaaggcagggagaaggtgccgtttggaaggagtacccaagagccgtaagctgaattggcagtgttttacatcttaagctgagagatagatttttttttcccctttttctttaaaaactctaaaactgttaattccaaggaacccagaagtctaggtagattatttctgctagttaaaagcagtagtcctgaaagctgaatattttggtgtcttttgagccaactttagtttcatcattaccaagggggaagagagctaacagttgatgagcacttgctctaggccagtccagagtgctgggcaccatacgcattttatctccctcccgctattcacaacaaatatgggaggtagtttatattatagccatctaataagatggggaaactaagactcaaagagattcagaaacttgtccatgattataaatgtaagagagttggaattcagatttatgtatttagaccccaagcctttctcattacatcattttgccttccaaatctctaccctctatccttcacctccccactgatcaaaacgagatgatagtttgccctcttcaaaagaaatgtgtgcatgtatatatctttgatttcttttgtagtggaaagttggggacaaatgttctgccatttggtcagaagacggttgcatttacccagctaccattgcttcaattgattttaagagagaaacctgtgttgtggtttacactggatatggaaatagagaggagcaaaatctgtccgatctactttccccaatctgtgaagtagctaataatatagaacaaaatgctcaagaggtaaggatacaaaaaaaaaaaaattcaatttctggaagcagagactagatgagaaactgttaaacagtatacacagttgtcagtttgatccaccgaggcattaattttttcttaatcacacccttataacaaaaacctgcatattttttctttttaaagaatgaaaatgaaagccaagtttcaacagatgaaagtgagaactccaggtctcctggaaataaatcagataacatcaagcccaaatctgctccatggaactcttttctccctccaccaccccccatgccagggccaagactgggaccaggaaaggtaaaccttctatgaaagttttccagaaaatagttaatgtcgggacatttaacctctctgttaactaatttgtagctctcccatgaaacttttgtagcttaaatacacaagaattttttgaaaaggaaataagataatgatgcaaaatagttaattttttaaaaaaatgttagacactgcagtggatgcaacaaaatactttatatgaaagatttatccagttaacttttgtggagtattaggtattagactaataattagcacacttacttaagttagaaagtataataatgcgccggacgcggtagctcacgcctgtaatcccagcactttgggaggccaaggtgggcggatcacaaggtcaggagatcgagaccatcctggctaacacggtgaaaccccatctctactgaaaatacaaaaaaatttgccgggcgtgatggcgggcacctgtagtcccagctactcgggaggctgaggcaggaggatggtgtgaaccccggaggcagagcttgcagtgagtcaagatcgtgccactgcactccaacctgggcgacagaatgagactccatctcaaacaaaaaaacaaaacaaaacaaaaaaaagtgtaataataatttatcattagctggatgatatgctgttgtttcccatgtcacctgtataagatatgtaaaataagaacacattatttacatctaatatagataaaatcctgaggcgctctcagattgttttgtagagttcaaatgtaaatattgttttcatttatggtccttttggttataagtaacagaaatcaactctaaaaagatttttattataggttagattatgtcatggaaccttaaggcttgtccctttctagttcttttgtgtaaagcggtgatttcttccatggagggaatggtatttaggcaatttttttttttttttcgagatggagtcttgctctgtcgctcaggctggagtgcagtggcaccatttcagctcactgcaacttccacctcctgggttcaagtgattctcctgcttcagcctcccaagtagctgagattacaggcacccgccaccacacccggcttattttgtatttttagtagagatggggtttcaccatgttggccaggctggtcttgaactcctgacctcaagtgatctccccaccttggccttccaaagtgctaggattacaggcgcctagcctaggcagtcattttcaaaaaacaagcatgactcaccaaaagttttaagattttctgtgataatgttcttattgaggcttacattatattacagtttcttgaatctaaaatgatgtaccctcttagaatatatacatcatgcttcattggtctcagggggctgatttttataaggagagatttgctagttttcacaatatgtcctctaagttggcatgtatagctaaacaggctttcataaaaatatacaatttagttaatgaaatttgggatatagtcttttatgattgaaataattttgctaaatagactgtctctgatttattaggtaatcaccactcttattttgttttacttccttaatgtctacatagaaaggaaatgagaaaaatccagaggttgtcatttgacttatgagtctgtttgacttcaggatttggtacatgaaatttcacttaatctttttgatatgtataaaacaaatattctgggtaattatttttatccttttggttttgagtcctttttattcctatcatattgaaattggtaagttaattttcctttgaaatattccttatagccaggtctaaaattcaatggcccaccaccgccaccgccaccaccaccaccccacttactatcatgctggctgcctccatttccttctggaccaccagtaagtaaaaaagagtataggttagattttgctttcacatacaatttgataattagcagaatagaggattgtaaaatgtcattgtagaacatcccttgggccagattctaatgggtagaaatttgaactaaacctctgggttttgtttgtttttaatgcctttctgttacccagatgcagtgctcttgtagtcccaagtctaagctctaggttgccttctttcctggcagaagttggtgtctatgccataaggaggtagttcctgttagaagggatttaattataccttatataaggaattagtgtttgcccttctaggtatagttggatgttagcttctgatgtaaactggatttctttttctttctctctctttttttttttttgttttggaggcagagttttgcccttgtaccccaggctggagtgcagtggtgtgatctcagctcacagcaacctccgcctcctgggttcaagcaattctgcctcggcctcccaagtagctgggattacaggcgactgccaccacacccggctaatttttgttttattagtagagatggggtttcaccatgttggccagactgatcttgaactcctgacctcaggtgatccacccgccttggcctcccaaagcgctgggattacaggcgtgagctgccgcacccagctgtaaactggatttctaatggtagatttttaggtattaacaatagataaaaagatactttttggcatactgtgtattgggatggggttagaacaggtgttctacccaagacatttacttaaaatcgccctcgaaatgctatgtgagctgtgtgtgtgtgtgtgtgtgtgtgtgtattaaggaaaagcatgaaagtatttatgcttgattttttttttttactcatagcttcatagtggaacagatacatagtctaaatcaaaatgtttaaactttttatgtcacttgctgtcttttcgtcctcgttaaatttaattttgttggtcttttgttgttattggttggttttctccaaatgctagctatgttaagaaatttaaggccaggtacagtggctcatgcctgtaatcccggcattttagaaggctgaggcaggaggatcacttgagctcaggagtttgagaccagtctgggcaacatagcaagacctcgtctttgtttaggggaaaaaaaagaaatttaagtaggagattatataagcaaaaatacaattaatttccagcattcactatataatataaatctccagactttacttttttgtttactggatataaacaatatctttttctgtctccagataattcccccaccacctcccatatgtccagattctcttgatgatgctgatgctttgggaagtatgttaatttcatggtacatgagtggctatcatactggctattatatggtaagtaatcactcagcatcttttcctgacaatttttttgtagttatgtgactttgttttgtaaatttataaaatactacttgcttctctctttatattactaaaaaataaaaataaaaaaatacaactgtctgaggcttaaattactcttgcattgtccctaagtataattttagttaattttaaaaagctttcatgctattgttagattattttgattatacacttttgaattgaaattatactttttctaaataatgttttaatctctgatttgaaattgattgtagggaatggaaaagatgggataatttttcataaatgaaaaatgaaattcttttttttttttttttttttttgagacggagtcttgctctgttgcccaggctggagtgcaatggcgtgatcttggctcacagcaagctctgcctcctggattcacgccattctcctgcctcagcctcagaggtagctgggactacaggtgcctgccaccacgcctgtctaattttttgtatttttttgtaaagacagggtttcactgtgttagccaggatggtctcaatctcctgaccccgtgatccacccgcctcggccttccaagagaaatgaaatttttttaatgcacaaagatctggggtaatgtgtaccacattgaaccttggggagtatggcttcaaacttgtcactttatacgttagtctcctacggacatgttctattgtattttagtcagaacatttaaaattattttattttattttattttttttttttttttgagacggagtctcgctctgtcacccaggctggagtacagtggcgcagtctcggctcactgcaagctccgcctcccgggttcacgccattctcctgcctcagcctctccgagtagctgggactacaggcgcccgccaccacgcccggctaatttttttttatttttagtagagacggggtttcaccgtggtctcgatctcctgacctcgtgatccacccgcctcggcctcccaaagtgctgggattacaagcgtgagccaccgcgcccggcctaaaattatttttaaaagtaagctcttgtgccctgctaaaattatgatgtgatattgtaggcacttgtatttttagtaaattaatatagaagaaacaactgacttaaaggtgtatgtttttaaatgtatcatctgtgtgtgcccccattaatattcttatttaaaagttaaggccagacatggtggcttacaactgtaatcccaacagtttgtgaggccgaggcaggcagatcacttgaggtcaggagtttgagaccagcctggccaacatgatgaaaccttgtctctactaaaaataccaaaaaaaatttagccaggcatggtggcacatgcctgtaatccgagctacttgggaggctgtggcaggaaaattgctttaatctgggaggcagaggttgcagtgagttgagattgtgccactgcactccacccttggtgacagagtgagattccatctcaaaaaaagaaaaaggcctggcacggtggctcacacctataatcccagtactttgggaggtagaggcaggtggatcacttgaggttaggagttcaggaccagcctggccaacatggtgactactccatttctactaaatacacaaaacttagcccagtggcgggcagttgtaatcccagctacttgagaggttgaggcaggagaatcacttgaacctgggaggcagaggttgcagtgagccgagatcacaccgctgcactctagcctggccaacagagtgagaatttgcggagggaaaaaaaagtcacgcttcagttgttgtagtataaccttggtatattgtatgtatcatgaattcctcattttaatgaccaaaaagtaataaatcaacagcttgtaatttgttttgagatcagttatctgactgtaacactgtaggcttttgtgttttttaaattatgaaatatttgaaaaaaatacataatgtatatataaagtattggtataatttatgttctaaataactttcttgagaaataattcacatggtgtgcagtttacctttgaaagtatacaagttggctgggcacaatggctcacgcctgtaatcccagcactttgggaggccagggcaggtggatcacgaggtcaggagatcgagaccatcctggctaacatggtgaaaccccgtctctactaaaagtacaaaaacaaattagccgggcatgttggcgggcaccttttgtcccagctgctcgggaggctgaggcaggagagtggcgtgaacccaggaggtggagcttgcagtgagccgagattgtgccagtgcactccagcctgggcgacagagcgagactctgtctcaaaaaataaaataaaaaagaaagtatacaagtcagtggttttggttttcagttatgcaaccatcactacaatttaagaacattttcatcaccccaaaaagaaaccctgttaccttcattttccccagccctaggcagtcagtacactttctgtctctatgaatttgtctattttagatattatatataaacggaattatacgatatgtggtcttttgtgtctggcttctttcacttagcatgctattttcaagattcatccatgctgtagaatgcaccagtactgcattccttcttattgctgaatattctgttgtttggttatatcacattttatccattcatcagttcatggacatttaggttgtttttatttttgggctataatgaataatgttgctatgaacattcgtttgtgttctttttgtttttttggttttttgggttttttttgttttgtttttgtttttgagacagtcttgctctgtctcctaagctggagtgcagtggcatgatcttggcttactgcaagctctgcctcccgggttcacaccattctcctgcctcagcccgacaagtagctgggactacaggcgtgtgccaccatgcacggctaattttttgtatttttagtagagatggggtttcaccgtgttagccaggatggtctcgatctcctgacctcgtgatctgcctgcctaggcctcccaaagtgctgggattacaggcgtgagccactgcacctggccttaagtgtttttaatacgtcattgccttaagctaacaattcttaacctttgttctactgaagccacgtggttgagataggctctgagtctagcttttaacctctatctttttgtcttagaaatctaagcagaatgcaaatgactaagaataatgttgttgaaataacataaaataggttataactttgatactcattagtaacaaatctttcaatacatcttacggtctgttaggtgtagattagtaatgaagtgggaagccactgcaagctagtatacatgtagggaaagatagaaagcattgaagccagaagagagacagaggacatttgggctagatctgacaagaaaaacaaatgttttagtattaatttttgactttaaattttttttttatttagtgaatactggtgtttaatggtctcattttaataagtatgacacaggtagtttaaggtcatatattttatttgatgaaaataaggtataggccgggcacggtggctcacacctgtaatcccagcactttgggaggccgaggcaggcggatcacctgaggtcgggagttagagactagcctcaacatggagaaaccccgtctctactaaaaaaaatacaaaattaggcgggcgtggtggtgcatgcctgtaatcccagctactcaggaggctgaggcaggagaattgcttgaacctgggaggtggaggttgcggtgagccgagatcacctcattgcactccagcctgggcaacaagagcaaaactccatctcaaaaaaaaaaaaataaggtataagcgggctcaggaacatcattggacatactgaaagaagaaaaatcagctgggcgcagtggctcacgccggtaatcccaacactttgggaggccaaggcaggcgaatcacctgaagtcgggagttccagatcagcctgaccaacatggagaaaccctgtctctactaaaaatacaaaactagccgggcatggtggcgcatgcctgtaatcccagctacttgggaggctgaggcaggagaattgcttgaaccgagaaggcggaggttgcggtgagccaagattgcaccattgcactccagcctgggcaacaagagcgaaactccgtctcaaaaaaaaaaggaagaaaaatatttttttaaattaattagtttatttattttttaagatggagttttgccctgtcacccaggctggggtgcaatggtgcaatctcggctcactgcaacctccgcctcctgggttcaagtgattctcctgcctcagcttcccgagtagctgtgattacagccatatgccaccacgcccagccagttttgtgttttgttttgttttttgttttttttttttgagagggtgtcttgctctgtcccccaagctggagtgcagcggcgcgatcttggctcactgcaagctctgcctcccaggttcacaccattctcttgcctcagcctcccgagtagctgggactacaggtgcccgccaccacacccggctaatttttttgtgtttttagtagagatggggtttcactgtgttagccaggatggtctcgatctcctgaccttttgatccacccgcctcagcctccccaagtgctgggattataggcgtgagccactgtgcccggcctagtcttgtatttttagtagagtcgggatttctccatgttggtcaggctgttctccaaatccgacctcaggtgatccgcccgccttggcctccaaaagtgcaaggcaaggcattacaggcatgagccactgtgaccggcaatgtttttaaattttttacatttaaattttattttttagagaccaggtctcactctattgctcaggctggagtgcaagggcacattcacagctcactgcagccttgacctccagggctcaagcagtcctctcacctcagtttcccgagtagctgggactacagtgataatgccactgcacctggctaatttttatttttatttatttatttttttttgagacagagtcttgctctgtcacccaggctggagtgcagtggtgtaaatctcagctcactgcagcctccgcctcctgggttcaagtgattctcctgcctcaacctcccaagtagctgggattagaggtccccaccaccatgcctggctaattttttgtactttcagtagaaacggggttttgccatgttggccaggctgttctcgaactcctgagctcaggtgatccaactgtctcggcctcccaaagtgctgggattacaggcgtgagccactgtgcctagcctgagccaccacgccggcctaatttttaaattttttgtagagacagggtctcattatgttgcccagggtggtgtcaagctccaggtctcaagtgatccccctacctccgcctcccaaagttgtgggattgtaggcatgagccactgcaagaaaaccttaactgcagcctaataattgttttctttgggataacttttaaagtacattaaaagactatcaacttaatttctgatcatattttgttgaataaaataagtaaaatgtcttgtgaaacaaaatgctttttaacatccatataaagctatctatatatagctatctatatctatatagctattttttttaacttcctttattttccttacagggttttagacaaaatcaaaaagaaggaaggtgctcacattccttaaattaaggagtaagtctgccagcattatgaaagtgaatcttacttttgtaaaactttatggtttgtggaaaacaaatgtttttgaacatttaaaaagttcagatgttagaaagttgaaaggttaatgtaaaacaatcaatattaaagaattttgatgccaaaactattagataaaaggttaatctacatccctactagaattctcatacttaactggttggttgtgtggaagaaacatactttcacaataaagagctttaggatatgatgccattttatatcactagtaggcagaccagcagacttttttttattgtgatatgggataacctaggcatactgcactgtacactctgacatatgaagtgctctagtcaagtttaactggtgtccacagaggacatggtttaactggaattcgtcaagcctctggttctaatttctcatttgcaggaaatgctggcatagagcagcactaaatgacaccactaaagaaacgatcagacagatctggaatgtgaagcgttatagaagataactggcctcatttcttcaaaatatcaagtgttgggaaagaaaaaaggaagtggaatgggtaactcttcttgattaaaagttatgtaataaccaaatgcaatgtgaaatattttactggactctattttgaaaaaccatctgtaaaagactgaggtgggggtgggaggccagcacggtggtgaggcagttgagaaaatttgaatgtggattagattttgaatgatattggataattattggtaattttatgagctgtgagaagggtgttgtagtttataaaagactgtcttaatttgcatacttaagcatttaggaatgaagtgttagagtgtcttaaaatgtttcaaatggtttaacaaaatgtatgtgaggcgtatgtggcaaaatgttacagaatctaactggtggacatggctgttcattgtactgtttttttctatcttctatatgtttaaaagtatataataaaaatatttaatttttttttaaa

SEQ ID NO: 2 - DNA, 170000 bp, Homo sapiens
  source 1..170000: mol_type = genomic DNA
ttttcattatgaaaagtctgtctacagttttctcttcacatctatctgactacaatatagttataaacccatctgtttcccaagtaacattctcttctaaaagtaggataatttttttccatagaaagctcagatataaaatgaggagactttttgctctttaggaatacaaatcagcttagactaaccaatcacactgaatttttaaagattttaccagtaaccaaaactatatattaatggaaaatggatatgggggaaatacatcctttgtcttaaaaacagaaccccaactttatttaggggtggcaatgggctcagctaaaaacacagtgattccacattcccttgcaggagggagcagccatttttcacagttatgacccataggctataagttaaaatctctagggggtttgggaaagctcttggaggaacctgatttagctggcatgtgtcttatgccttttggtcttcctatccttctccctagcatgtagttaggatgctggaagtgaggcagccatctcaagaccatgaagcaacaaatagaaggatgaaagtcacaagctgaggatgtttgagaggaagaaaaatgagcttaggcctctgaagactgtgaagtcctaccttcagactaatgtcacttaagaaaaacgaacttctattttggttaagttagtatatgtttgattatctcttacaagcagccaaacctataccaagttgatccaattagaagaatgtgccaaaaaaatcttttaaccgtttccaaacgtgcatttcagaagcattcatttactttggcaattattaaactgatatatattagtaaaacatttttatacacttcttaaaatgactcctccaaataactctactaggccatactctatgcacttcctatacagggagggacacattatgaatacttttcatccctccattgattcattcagcaaacacttattggaggcccagaaagcattgtgctaggggcagggatgcaagaatgaaaaacacacacctgattacaaaaggcttagtttatttgaaaagaataagacagaatattttttaaaaacattctattttccagttctttgcttcctgagggttgtttgtttcacatacattagctctccaagggatagagaagcctagcaccataatcaacatcaataaaataaaaggatctgagccaacaaattggtgtacatagcttaatgttcagaacacaaattcatcattgaatatttaattaaatgttgcaccaatgtgttcattactgttgtgagaaataactgaagaaagtttctcattccaatcagtacagaacttgtttttccaaaatcagactactgctaaaagcagatatttagtactactccactttttttttctgtcatttgtatgatataaaaaaatcactgtacatcaagcctttactccagtatcaaaagacaattattcattgcagtatagctgacaaaataacaagttagtgtcaggaaaaccatttttcactcacctcttcctctatgtcaggcatatcatctaacttctttctacctcagtttccttatgagttaagtaatgggttggaattagatcactgtgttccctcatagatctaaattctcttatttcctcactctacttagtgtgatgcattagcagataggtttcccagctaagagcagaacattaagattatttttaaatgatgtgtggttccttctctatttctgttacctcaggaattatacatattagccaacaactcatatcaaaccacaattttatatataattaaacaatataatgtcatcttttattaataatactatatcaccatactcaaaatcagaatagaagactggttttattatttctagcttttaaaagcataacttgcattgcacacatttgggataattgaaagaaaattagatggagtgtacattgttttaaatttgctgttcacattatcccccagatatctaggagtaagtctaacacagattatctcaaaagcacagcaatcctcttgctccattataagaaattattttcagagtctaaaagattgattatatgcaaaatctgaaagctaaaattaagatcttatttttcagtatagacaatagaagtaattaattaacacatctgacatttatcggcaacccaccataggcagagatctgctttcttattagttgcataagattttcagaagttgaaatacattaaatacaaccagtttaacccaccacgttctgaatttgatatcctattaccttgctcacaaacaagatctttaaggaacataaacactctttacaaatcctttagttaccatcctgcaaaacaactcacacccccaataataatctcattacatatatacatatttccctctactcaccacaatgagttaaaggtggacaaaagccctcggtgactgtctttgagttattactttgctttaccatttccttccttttaggtgtcatggtacaggactttactgatagcaattcattcttgttaggtttactgcaaacaccaaaagaggtgtcttgcacttgctggaagacttagcttttatgcttctggtcattcttcccacaaaaagaatgagaccagtttctgagctattcttaactcgccttccaaaatatttcaaaagaggaagacaagaaagacttcatgatttccatgcaaactcccagcctgcctggctgcctgctgctgccaatacttcttgctcttgctggtgatgacattcagagagctccccagcactggtgcttcgttatgtaaggctgtctaggtcaagtgtaggagacacactgctggcctgtggaaactcatggaactgttcctccagattaacacttcaggggttatggaagctggaggaagctgagcttttactacatcttttgggggtaaatatttttgcatgtttcagcagtttatgtactacagtcttggcagatgcctgtcagtcatgctgagaggtgcagggagaaattactgagattacagttctgtcagcatgcttgaataagcatagtaagtcttccagtaatcctggctttgagacacttaaggagtaaataaatcataaattcaaatttgcttatcggacatcatctgtaaccatcaaggaatgaatgttgatttgatatttaaactctgaatacaatttatttgattggaggtgttgtaggagagcattattagaggtggctattagctcaaagagatttactgcagttcttggctgttacgttgcccttgtctctggctgcaaatttgcttcccttgtaagtgagttatatatatgcctgtatttgtcttctgttgtgattgtttgtgatcgtataagaataaactggcagttaggtgacttcaacaaataatgaatcctgcctacttagtttcaaggtgaatactgcagcaaaagcgccattcgacactagcactgaaggagggtggattaactgcattggctcaaactgtgctgtgtttaggagacttgaagggatgattccaggtttgatatgaacagttgttcactctatgggtaaaagtagaaacaatatagcgctgattctgttttagactctcacactgtgtcctgcctcagcaattagttaaaatagcaggctctttattgaatgctgcagaaaagcctagagaggtagcagggtaagattgccgcagcagagtgatatattggccaggaattttaataagatttaaccagatatgataatacaacagatggcatctaatctaaaaaatagatggatatttaaaaagttgaagacaaatgtagcacatttgagagggtttatcttcctgtgtgtccttggcaagtgaagttcagtaccttggacaggatgacatgagttaggaaagtaaagtctgcataaactgtctacgtgatctcaaagagcaaaatggaaagttaactatcaatcatttgttttggtgtctctcagtgatgactggcattaggcaggttacttagcacatactttctaggtaaacaggtagttttaaagtatctaaaatttcttgcattttaaaaattaaattaaaggaatgaaaatgagtgatcgtaaaataaattcccctgaaggtacttttcattctattaaccatattaacagcagcacattgattatttatgatgaaaatataccacttacaattgtatgctgtatttagttgattaaacatgtacatgatttcccaaataatttaaagagacaattatggtccctcggggcctgattttatattactgaagtcaataggcattttccctagacatagcttgagataagagccccatcagaccaggttttactcagtttggcattcagactattcctcataagttaaaaaatgatggatacatacttaattgtacttataatctttgagtttatatatctttcagataacaatgtcagtgttcaaattgtctataattgatttgcatttaatattgtttcttttggctattgctaaaagggattcttctttgttgtaataagcttaaaatatattaattttttcattttaaaatggggaatttgaattaaatgaggtttaaattagttttgattctaccatatatatctttgtattcctctaaatgggaattaacattattaactaatctatgttaaagtgagattacattttttggtgagattatattgtttgaatatttacaatattaagccaaaatttactaagtacctactaaattctaggacagtggttttcaaagtggggtctcctaaccagcaacatcagtactacctgggaacttgctaggaatgcatgttttcgggcctcatgacagacttactgagtcagaagctctagggatgggtcctggcaatctgtgtttgtgtaagcctttcctccaggtgactgtgaggcatgctgaagtctgagaaccactgtgctgggaagtaatttggttaaatattataaaaatggtttttactgtatatagttaaatacatattgtcattaaattttctatgttcatctttgcctagatatcctactgtaagcagtactatgttttaaagatttatgcaattattgagtataccttaagtctaaatatgtccataagaaggtctattttccaacagttccattttagaactttagctcttagaagttaaatactgtaatgggaaaaatactagaggacttatctgtttgttcactgtgtgatttggcacatatcactgaccctctttgatgttcagcttctcatttattaagatgagaggttggcttacatcagggtttctcaactcagtactattgacatttgggtcagatattcttcgctgtggggtctgtcccagacattgtggaattttgagcagggtccttgcctctacccacaaagtgtccatagaaaccctcagttgtgatgaccaaagatatttccagacattgatacctgtctaccaaaggcaaaactgacctcctcctcatttgagaaccactgacctagattagctccgctatgaaaagttccatcataataaataatacaacaaatatatcatttatccttttggaagtaggtaggttaaaacttataaataaatgaagacatgttttacttgtataactcaggtataaggtgggacctgtttgcacccttgaagatctaggtgacgatctattggtagatatctgttggcagatatcttgctcaggtatctaccaataccacagtcagtggaagtccaaaaccttctgcaacttatcagggacttagtcttacatcatcctctgtgtcctggcatcgtggtttcatgtatactacacctaaccactctgtcaagtgacccagtgtctgtctgtccctagtttttaacagagacttacctacaccaatcaccttttcaatttaataaattttattaaagatgtgggcttctacccgcattttctcccttccccatcccatctctgctcctcatcccctccctgagagatctgaacactccaaatttttctcttcttagtatggaaagtagtccatctctccacagctcttatatccagacgtagatgcccaaactcatcaaagagtttagaagataaagggccttcaatttagaaccattcaccatacatagaaggcagttggggtcatatggtataatcataaagttataaaatcataggctgttggaaggaatattgaatttaagttcattttcatgtctttagccttaaaattacaaatgttacaagctagagtctcagaattttaaattataccttcccatgaatttttacctaaaccacttggcaatttagtacagacattttctcgacctgatatgtgcgatagaagtagacaagcctcacacacatgcatgtgcgcctacacacacacacacacacaaatttttctccaacagttaaagattcttttcaatatactattctacaattcaaattaggtgctattctgagatatatgtggattaaggaacctaatataagatataggtagctatatttctgttaaaataataatacctcatacttgaatgactatatatgtattttcaagtaattttaaaaacatgatccctgccgggagtggtggctcatgcctgtaatcccagcacttggggaggccgaagcgggcagatcacgaggtcaggagatcgagaccaggtggctaacacagtgaaatcctgagatcgcaccactgcactccagcctggacgacagagcgagactctgtcccccacaaaaaaaaaaaaaaaaaaaaaaaaaaaaaaattacttaggccaggtgcagtggctcacgcctgtaatcccaacactttgggagaccaaggctggcagatcatgaggtcaggagtttgagaccagcctgaccaacatggtgaaaccccatctctactaaaaaatacaaaaattagctaggcatggtggtgcgctactcagaaggcagaggcaggagaatcgcttgaacccgggaggcggaggttgcagcgagccgagatcacgccactgcactctagcctgggcgacagagtgagactctgtctcaaaaaaaaaaaaaaaaccatgatcctttctgagacccatagcaactctaaaagataggccccattatctctgtcattttgcagtgagaaaataaaggctcaaggtctccaaatgccaaattcacttctcgttccactatcctacaaagcaaaactcaatagttcatgtagtttgaacacattggtaagtataatttctaagtgattttttataaagacctgtctcaagagtcttcctgctctaagaccttcagagagattaccagtgctttgttttattcctaggattaatgcattttacctgacttatcatacatttattcgtatcatatgcttaattaattttccggtatatgtattatagaatgattttaatacatcatttattatactagtcatagtcacatgtgttctatcacttagtgccctcaaaaaactccatgggaataggattattacccccttaagagggaataattcaaacatgagattgaattaaatttccctatacttgagctttaccagaggtaccacactgatgacccagccaacttctctgttttcaccaacgaaaatgcagaacatagcaacagaccatctcttttcactggcaccctccagtgcttgacatatagagagtgtcagtaacttttattgaagaaatactgaaatattgttattgctatgtagttcctttacattttggactttacctaacattaaccaccctagttaattaagtagcaacttgcaaatgaggcctggaagaaccaaaaaacaaattttaaaaagaactgtctgcaactcggaactgctaatgctactttctttgtttcactttatttcacttgagaaaatctctttgggtttgatacggagatgttctcagactttgaatgtgaaaaattgttcccaagatcaaatataaattcctcctttaaaatacaatgtcacaaacctggatcacaaagtcacttccctctttagtcttaaagtgaatactcaagatgaacgtgaatgatcttttattccaatttccaatttagaatattatttcagaaaataattattcaaagttttttgagaaacctccacataaagccaaacaaatttttaccaaagtaaggtaaattctttgtcaactgagagcctgaattagatgattcctcagacttttttctaattataatattctaggtaaaggagtttagctcggcaatatgaccatccaaatatcaaccaaatccaagatgattagatttaatagcgccattttggagatgcattgattattgaagataagtaaaggtctcaacatttttgttttcctcatttaccccaaaatacatccttagtcacacatgtcttaggatctggaatttgtttgataaaaatgctgagttctggccaggcgcagtggctcatgcctgtaatcccagcactttgggaggctgaggtgggcagatcatgaggtcaggagatcgagaccatcctggctaacacagtgaaaccccgtctctattaaaaatacaaaaaattagccgggcgtggtggcaggcgcctgtagtcccagctactcgggaggctgaggcaggagaatggcttgaacccgggaggcggagcttgcagtgagccgagatcctgccaccgcactccagcctgggcgacagagcgaaactccatctcaaaaaaaaaaaaaaaaatgctgagttctgaaaaaataaatctttcttgttttgtttcaaatgaaattatagctctctgataaagtggcattcctttttctgttttatattcaacgagtgtattagtccgtttttgtgctggtaataaagacatacccaagattgggtaatttataaaggaaagaggtttaatggactcacagttccacatgactgggaaggcctcataatcatggcagaagacaaaggaaaagaaaagacacgccttacatggctgcaggcaagagagcttgtgcaggagaactcccatttataaaaccaacagatctcatgaggcttattcacttactagaacagtatgggggaaactgcccccgtgattcaagtatctccacctggcctcacccttgacacatggggattattataattcaaggtgagatttgggtggggacacggccaaaccatatcagcaagtgaaacagtgaaattggatttctaaaagttgtcagtgttctgttggaattattttattcagagaggtaaggaaagtacaacaggtgtcaaccttccatatgaaatttcctaaagaatattattgttacctcatgctgggagaagggaaagtagcagtgatagagtgttttgatttcaaatgtacagcttctagtaaaagcattataattaactttatagtagtaagcacaaccaggaatataaaaatataaaagttttgggtttggcctccagatttaccaaatgttgcttcctaacaattagccaaccctcccacactgacacttactttgtctaaattgagttttaggagaaaacaacccaattataaagacacaactattatcagtcaatgccctgacaagaaacagatggctcctccaaacttgtggaaataaaaagcaaactatttggttttatcttctcaacacgatattttcatggattccttgggaatgcggttccagttttccctctttagcaggtgtgccaggcccttctgatctggctgtctgcctacctctccagactctagccacttccacagacccaactttacatatatcctacatgtatctcctcttcttagaatgcacctcctctttctcctccaccctctttgtgtctactcataaatgcctcagagaaattcctagataagtttaagacagtctagattctacttcccagtcaacaaagaaaaaagtttgataatttctggtgatggaaacagtttcttatgctgttctggaatataaaatggtgccacacctttggagggaaatctattgatacctactgggttaaaaggcacatacccttccacctgacagatccatttcctgagactagatcttaaaggaaaatttgcacaagtgggaaatgcaattgtaaagaaatgtatacatccgcattgtttgaaatagaaaaaaaaaaaagaaaaggaagaaagaaagaaaataacataagtgtttatcatctgagaactgattaaataaactttggtatatccatctatatacagaacaaaatattttaagcaataataagtgaactaattagagataaattatgtaacttaaactaggtttacagccatatatattgtgtgatgtttttctttctttttaaaaaaatatttgtggagatgggttctcagtatgttgcccaggctggtcttgaactcctggccccaagcaatcctcccacctcagcctcccaaattgttgggattacaagtgtgaaacaccatgcctggtgtctggtacaatgttatttataaaaaaaagaaaaatataaaacacgtatatttcagatgcttggatatacacaagaattctaaagaagataaaaaaaaaaaaattaacagcgattgccactgcagactgggcctgagggaagagaaactggaaagttaatttttacttcaagagccactcaagtcaattgacattagaaatgtgacttagaagagtagattgggtttgcttggtgtatctaaatagtatgtacaagcagggctgcaaaggggaatgggaacacccggggagtggtgagcagggcagaatggctgatttacatgttcaaggtgcagaaggaagtgagtaggctttaagagctgaggccagatgtgacagccagggcttctcaaacaccaatgtgcacagaatcacctggggaaatcttgttaaaatgcactttcttatttagaaggtctgggtggagccaaagagtccacattttcaacaagctcccaagaagtggggatgctgccagtatgtggccacactttcagaagcaaggttttaaaattctgaaagtatcctggttttgcgcggtccgtgtcttcacaaacatcaagcagagccgaaaagcacttgtttttagaaaatgagctgagaaaaaaacacctaattaaatacgatgtttgcaacatgaagcttccaccaaaggaagcttactgttaagtgttcacgatcagcagttctgctttgctagctttttcatttctaacaaatttagacttctggagattgaagctttgccagattgaggcatgcttctcccctcactactcatgtgtttagtgtatttgttaacttggtgagagtacgtccaaacatagttatattctttcacttgctatggaagattgaagaatctgagacaagtaagaaggaagatctccatttgcctccctcccaccctgccacatgctgccccctaacatgtttgacaagaatccaggctacagactgatcatacacctaaaaactatcttcggtcagctacttgtagaaatgtctctcccccattatgtccttatatgagcttaatgtgatgtaatccttagcagtaaagaaagactattgtcttctgtttgtttgcctgtgaactcgaattgcagagactttccaccataattttaataatgtgatattgtggagagttttagtatggccttatggtaagattaggtactttggagatacactgctggtttcagaatcacacttagtcacctcgttactgtgtgatcttggccaagatgctcaactactctgagcctcagttgcctcatttataaattcatgaagataacatggtaatagcaactattttatgagactgttgtgaggtttgaaggtcccaaaatatattaagtcctcaataaaattaacaacaattattattattctaaaattattcttagaatttatctaaaaatagtactgcttgaatatccatatgtttattcctgagtctctacctgctatgatttggctgtgccccactcaaatctcatcttgaattgtagctcccataattcccatgtgttgtgggagggacctggtgagagataactgaatcgtgggagcagttttccccatactgttcttgtggtggtgtataagtctcacgagatggttttataaggggtttcccctttcacttggctctcattctctcttgcctgctgccatgtaagatgtgcctttcatcttctgccatgattacccagtctcaggtatgtctttatcagcagcatgaaaatgaactaatacactgggcaatttacaaaagaaaaacaagtttcttgaactcatagttccacgtggctggggaggcctcacaatcatgctggaggcaaggagtagcaagtcacatctcacatggatggcagcaggcaaaaagagagtttttgcaggcaaactcccatttttaaagccatcagatcttgtgagacttattcactatcatgagaacagcacaggaaaaacccacccacatgattcaattacctcccactgggttcctcccatgacacatgggaatggtgggagttacaattcaagatgagatttcagtggggacacagccaaaccatatcattccactcctggcccctcccaaatctcatgtcctcacatttcaaaaccaatcttgccttcccaacagtcctccaaagtcttaactcatttcagcattaactgaaaagtccacaatccaaagtctcaaggcaagtcccttctgcctatgaggctataaaatcaatagcaagttagttacctcctagatacaatgggagtacaggcattgggcaaatacagccattcaaaatgggagaaattggccaaaacagaggaactacagaccctgtgcaagtctgaaatccagcagggcagtcaaatctttaagctccaaaatgatctttgattccatgtctcacatccaagtcacgttgatgcaagaggtgggttcccatggtcttgggaagctccacacctgttgctttgcagggtacagactccctcctagttgctttcacaggctggcattaagtgtggcttttccaggaacacagtgcaagctgtcagtggatctaccattctggggtctggaggatggtgaccctcttctcatagctccaccaagtggtacactagtagggaatctgtgtgggggctctgaccccacatttcccttccatactgccttaacagaggttctccatgagggccccacccctgcagcaaacttttgctgggcatccaggcgtttccatacatcttctgaaatctaggcagaggttctcaaaccccagtttttgacttctgtgcacttgccggctcaacaccacgtgggagctgccaaggcttgaggcttgcaccctctgaagctatgacccatgcactatgttggcccctttcagccatagctggaatggctgaggcaaagggcacaaagtccctaggctgcatacagcatgggaactctgggcctggcccatgaaaccacattttcatcctaggcctccaggcttgtgatgggaggagctgctatgaaggcctctgaatgccctggagacattttcttcattgtcttggggattaacattcagatcctcattgcttatgcaaatttctgcagctagcttgactttctcctcagaaaatgggattttcttttctattgcattgtcaggctgcaaattttccaaacttttatgctctgtttcccttttaaaattgaatgcctttaatagcacccaagtcaccccttgaatgctttgccacttagaaatttcttccaccacataccctaaatcatctctcccaagttcaaagttccacaaatgtctagggcagggacaaaatgccaccagtctctttgctaaaatataacaagagtcacctttgctccagttcccaacaagttattcatctccatctgagatcacctcagcctggatttcgttgttcatatcattatcagcattttggtcaaagccattcaacaagtctctagggagttccaaactttcccacattttcctttcttcttctgagccctccaaattgttccaacctctgcctgttacccagttccaaagtggcttccacatttttgggaatctttttagcagtgccccactcccagtaccaatttactgagtagtccattttcaagctgctgataatgacatacctgagacatgacaatttacaaaagaaagaggtttattgaacttacagttccaaatggctggggaggcttcacaatcatggcagaaggcaacgaggagcaagtcacatctcacatggatggcagcaggcaaaaagagagctgtgtcagcaaaatcccatttttaaagccatcatatctgatgagacttatgcactatcatgagaacaacacaggaaagactcgccaccatgattcaattacctcccaccaggttcctcctactacatatgggaattgtgggagttacaattcaagatgagatttgagtggggacacagccaaaccatatcatacactaccatatactaggcactgtattaagggttagggtattaaatagaatcttttatcataaagatttttgttcatctctgtaaaatattttagacacatgtgttttgctttttaaacaaagaaaaagagatgtttttagagataagatgagacacattgttattttccccagttcccaccagcccttcacaactgccaacctggaaaaaacattcccagagcccaacaaatgctggagccctggaagaagggctactagcaggagcactggactccaaggaatgcagaccagggaagagagtgttgggagtattaaaatgtaggttagaagtggaataatggacaagtagagggaaagactttcaagtccactttccagggattgagaaacttggggtccttcatccgttggctttgaatgcagcccaagacaggcattagcagaaaattggagagtctccccgaccacacctcacttcctagcttaaaaaagcagctgcattcctctttagttaaacctctcagttgggtcttctaaagctctagctctcaccggaatctggtgccactttcactcttgcctggaatggcattggctctctctattgctagttcctgggcactcatcaaccatcttaacccacttggtcaatagtttctccataattatttttattttaaccattttgaatgtaccatctactttctgctaggaccatgactgcatctgaggtataattttaaagcaacaaatggttcatggaagggtaactctgtttgtgatgcccaagagaggagacttagggcagatagagatacatataaagctactgctgtcctagagagcagagggacaagaaaaggggagagagaacactcattagcagttgtgtgtgtgtagcataacataacatatatatatatgcatatatatgatatgtaatcttagaaacaactaccatgtgaagtagagcaaatgatcgctgagtttcatccttgctaagagcatgggaaaatccacattctatgtttgcttagttgcagaaagaataagggaagcagaaacgtcaggggtcacatcccctatgtgtcaattaaaggggtgcagactcagaaggtgtccttacctactttatttagcctgctcttccccacaaagatgaggaatacaggtgactttgatgtcatgatagcaatcagaatgtaaaagagactttcaaaaagacctagtgcaacatggaaacaaggactttagtctctgagcttccttatgtatcaagtgtcatagaaaatgttgagacaaagtggttctgtcatttcaacaacccataatgagcagaagaatctgtttgcctttcatgccactgcagatgaacaggtatgagagactgcacttaggcatgaaagtgccgctgcctagcacctctatcccatgctcacatccgaatcttctcaggtgtgggtaagacatctcagttctctgctatttgatatgaataggggcaatcccagaagcagcaactgagctcatgggccccaaaatttccaaggaatcacgaggagaactaggctaaatgtcattattttctgaccttcgatgtaccttttccctagtcacttgccaatctcttctaaagggcctcagtccctggagtggaccctaatgatttctgtccattatttggcctagagtagaattcttgcttttctcaaggaaagaaacaaaaagaaaagatgtaaccaaatgtaatttatgtgagtttgtaaattgatatccgaagattggaactgcatacagatgtgtcaaaaatgttaatttccccaagaaatatggtagcacctaattctagcgacacttgtatactttacagatggctttgctgtgctcctggtaaagtcaatgactttctgcctttgaacatgaaaggaaaaagatgttgacaggaattctttagggaaacagaaactacatatttgcttatgctaagttatggcaaagttcagttttattctgtaaataaagcgttgtcttcataaatatcagctatatcctttagagtaaagaaagtcctctttattaaaaaaatctaattgaaactcttcaataggtaggcaagtgaggtgattgatataaagatatacttaagtggaaaattggtattcgagttccaataagtaatcaatcatattgttcttggtaatagcttttgttgattcatctttgcaagggatgtcggggggtaggggggattgctgaatgaaataaatcaggaaagaacccaagcattatgtttaactgacttaagagcaaaggaaagaacacataaacacagaatagaatccacacagtaacttcattctttatgattgctcaggcattttcattatttgcatttatgtttattttctctttatcctcctgtggcaatagatatggagataatgctttaaatattgtgatgtaccttgatcttttctgaagaaccaaagctttatgaaatcttgatacatttaaaggaggggtataaagctcaggcatgtgaaatgttgaattttgtctccccatatgacagataaccatcatataaatgtggtttattagactaaaaaagtagaacacatatttttagattacatcttggcatttcaaagaaagtatagaacttcaagatagtttgcttcctggatattttctggagctgtctttgggcctgcattcctgaaagctgtcaatgctacactctgcatacccagagctcgtgcccttgggcttgagtactttgtggttaatatttaagaaccgcatgtggagctagattgaaggacagtcactttctttattctttgctaaaaccaatgttggttagtccatcaccttcttaaacagtaactgcattcatacccttcatcacatccatctctctgtcaaaacatgagtgaaaatcaattgtggcatatctagaaatacttcactcacttccattttgcttcttatgtgctgatgtaccttactcaatattaatttcctttagagttaaactgtgggaaaacttgaatggacctttgtggtataaaactatctatgtgaccttggacaagtcactgcacctctcttggcatcagtttcctcatatccaaaataagaacacttgcctggtttatctctgagacttttccagctccacaatttctcaatgattagcaaaaccctatcgataaagcaatggtaatgatttatgtaaattgacattcttttttatgaggtttacaaagttattttattctactccagggttttgttggaagtctattacggaatttttattcatcaatactcagcagatgttatcaggttctctccagaaactaccttaattctaccacagacttgggatatgtttggggaacaatgacaaaaaaaataagtcatagttcttactttcaaagagattattgagtggggtcagaccgtggagaggtgcaccgatagagggtggaggaagatgcggtcaaagaagagaaggtcctgaaaacagaggaaacaaaggaagcggaacagtgaaggcataatggctccctgcttgtttaggaaaaggcagagtttgttgttttgaaaaacgacatttagtgtcatcttcactaaatattaataatgtcttcttacacgttagctaaagaagaaaagatcaaaaataaaccaggcccccaaataataaaggatttaaaattaaagatatatacagagcactatagtaatttttgaagtgctgttcagttggtgatataatcagaggaataatgctattacatcaagtgataaaaagtaattttgtgatttaatactcattctgaacctatattgtaatgctaatctcatcagatgattgacattcatatacttaatttccctttgagaaatcaggttcatgtattattctgtcttgtttataaaagctacttatttggtttaggaatattgttatttccctctccaacaccaatgtctgcctatgtaattgaaaggaaattgcagtgaatcttccaacaaggagtaactgcttccctgaaataatcacctgcagacataattctggcttctgtgcgttgtctcgatagcagggaaggcagagggcaactggggaatctgattatctccatcataatcccacaacttccctcctttctcttttgcttttaattactgcattgtggtgagttaagaaaagcctatactattttttcttctccactaccagaaagagagagagataactggcattctctctctaaggatttttaaaatacttttaataaaattttaaatagtgtaatgtgtgcccacaagcacattggttctaaagatacttcaaaaatacttcagaatcaaatctgtaagaaaaaaaaattcaattatttatgttcattatattacaagtgatttaaaaactggttatctgtgcatcaaaaaatgcaagcctatagcagctctgattcagtgaattccagttgcggggaggggaggagccctcagatatttttatatcatatttgaaaaaaatggctgattattatttttttaatttatggaatgtatggactttaccagagtttcaaaagtccactttagtacctataagatattttgaaatcagttggccaattcttgccatcaaaaaattgtaactttaaacttgcagaaaaactagttggctctagtcctaaaagagagttcttaattgcagtttctgcatttatttgtctaatagcaaataaatttcacattcatttctgactccctttcaaaagggcaggttaatctcaaaaggaaatatatgagtttatcattttcggctaggatatggtttctatttctaaaatagtggcacagtgttggtgaatgctttgtgagagcaaggaattggtagtagatttttgcagaatgctgcatttaccaaaagaaaaaaaaaaaccactaggaaattgacatctacaaaagcaaagtacttaagtagtaaattacatttaccaaggatcacatcagtagtgtgctttatctgattattccaatcaaaagggggcaaagtcaggatttgtagtgatacagtggtcctgtagatctaaaatcttaaggtctgagtttaaatccaaactctagcatttgctatctgtgttgggatcactccccgacttcatcagaagacctgctaacatctagacttgtctgttgtcaccaccatctcctttgggataccacctcaaggtactcaagttcgcctccagcctccaattcctttcctgcggtgggaagagaggggagacccagcttcatgttgctcagtgactatagattcccaaacaaatgacaggggaatttagaaacatttctgccttaaaactcaaatgtcatttataactctaaacaagggaatctggaactcaaaacataatgatttggtcatcactttgggaaatttttggctaaaaattaagaatggtttccttctccttggcaggcataaagttaattaataaattctcttcataaggcagctggttaaagtttcagaactccacaactccaggagatacacatttgaaagaatatttttgataaccaattacctttattttctatgcaagaaaatattaaagaatattcagatactaattacactaattcctcagccttctgataatgagatagttctctctttgaactctttcaagatctaatggcatcgagagactctcctttatgtcgtaaaactaacagacaaaattacctggcccagctttttccacctgagtgacctcacgctctctttaatacccaaaatctattgacagagattatgtcccattataatattcccttttatgttttggcactgagcagtgcaactgacagagctataacaaagtaacaaccacattcacaggacagagacggagtcttacagagacggagtcttacaaagactaaatgacatcttacgccttcattctcttttccttgttaggaactctcataaaaaagccacagccatgccccctcagcctgtttagcaggttcatgcattacagattgaagtattgtcacctaggaagtaggcagctaattttttccagcttctgaaacaagattacaaaggggttcctggaatggctaactttaccaacgggggcagaggaagattagtttttcattttttgaagttggaaacgtaacagtgagaaagagacaaaattatctctcaataaattaatctacaaaaaaataaataaaatgcaaagctggttccacagggagtttacattctgggagccaaataagatacatatataaaactcttagaacaaggtcaaatgggataagtgtagtagtgacatagggtagcacagagttttgttttaatatcttctgctaactttaaaaaataaatatgtgattttaagtgcatattacactaatttaataaaaatctcatattttgcctttatgctcagtctgaaacatggaagatttaaagttactaatactgtaaaactgcttcagctctgacgaatgaagtatctgtgtacagaatgatgagttgttagttaatagtactctttgggccatgcttgggatattggccttttctaggagtctgtatgagaatagtcatttatctccttatgctcaatgctttcaacttgtcaaatgaccatgtttcataagatacaacataaaattgttctataattaacaaaagaaaaaagaattctatctgctgagaaaatagaaaagacgttggagaagagagaatatttgacccagacatttaaaatatccgccgaatttgctatgtgtagatggatgaaaggtctgccaagagaagtgaaggttgtgaacaaagacatggaggcggaagaaaggtagtgtgcacactgaatgcgttgtgcctttccatatgactgacatgtcaatgtaaactccacaaagggagggttttgatctggtttgtttgccgatgttacttaagtatctggaaaagtgcctggcatatatcaggtgcatgaagaagtgaataaatgaagtgtcagatgcccagaatatgaataatacttgatagatgcagtactggcaactttcttgaagctaatgaagtggttaggactccatagttcaacagaaaccaagttcacttaagcaaacatggagtttgagtttatcatgggactcaacatcaagaaagtgtttggatcttgagtagactggagatggaaacagtctgtctctgtcttttgtcacttcttcctccacatctgtgtggctggctgctatttcagtatcctggtccacctggtcctgagtccccatggtgagggaaagctgactccatagctgccagaatcacatgtagtggctctctttgaccaggtcagctgcgtagataccctctcttgctccagtcctctgtagcaagagggtaggtttaccactaaggatcaggggagaagaactattgggggaattgttaagagcagacactcagaaaaattggcacctataatatgcaattagaattcattaaaacatgtggccaggtatgttcttattttgtgtttttacatatctaatctctaagtactattcatatggaatgtattattctaaaaaaattgcctgttagttcatgcagttcccactctcttttcatctctaacatcttggcaatcgtttaccagttgttgatcacctgtctcctcatcttctttcaactttgccctgactctaccagatactgggcaacatcatttcccagacattgagtaacttcaaatgaatgtgttcatgctactccaactggcttttgggaaagcactggatagagtttttgagctggaacaggaaattatcttacttaatttctttcttttatagataaaaagatggatccacaagatggacccattggtccataattaagggctagtaaatgttttgtaaacatagaaatcaaaattacttttctgtgattctagaacaggaaaaaatggtgaacttttaggtatgttgcaaagaacagtggattattctttgggctcttgggaccaacagccttagttttattgctttgcaagctatgtggtcttgaataaacctcagtaaggctcagaaagcttcagtgttctcaagtataaataggaataattataatataataacattaatagtatttatctcaccatcctgtaataaggaagagaaggattaaatattgaaggttatattgataaatgataaaacacatgcaatgattgtaataagtgtgttagatggcaaaagaaaaataatgaggatgaaatatttacttccaatgactaatctacacataatcgtgattttatgtatgactgaatgtttaaggctgattccattttagaatacaatatataacataaaaagctctactctcagttccaagagttataattagtttggcatggatttttattgtcttagaaaaaactgatattcatggtttttataattctatctttgggtaataggcaattggactctctttctatatatatttgcttattaaaatgtgttattataattaagctttaggctgtgtccacaagatgggaaaacattggagtaaaatatagtaaaaccatagaaattgagagtgggttgaaagtcttgtttaatctgtaattacagatgaagatagtaagaatgtaaatgtccatagaagacttcagtggctttgttaaaggcatgtgttcatcagtgttgaagtaaaactcacattttgtgactctgagctgttcactataatatgaaacctaatcctaaaacacaatattaaaacagaaaaatgtgaagccatagatctgtaataaagggccacctgattgtttcctggtggaataaaaagacagttttatttataagatatatcatttttatagataacaatgattcatattaggaataaagtaacagtttcaaactaaaataatgctaaagtttttcaagtactacttgaaaatagctatatttactttcaaaccttttcctctttgagtcattaggttcatgatattatatagcaatagggaatgaaagagaagcaaggagaagcaatactgggagattacagagaagaaaggaaaaaaggctgagagaaaagaggttgaggaagaaatcataaatctggattgtgagaaagtgtttaatatttagccactagatggcgatgtaatgtaaggtgctgtcttgactttttttttttttttttgaaacaagctatttgctgatttgtattaggtaccatagagtgaggcgaggatgaagccgagaggatactgcagaggtctctggtgcatgtgtgtatgtgtgcgtttgtgtgtgtttgtgtgtctgtgtgttctgccccagtgagactgcagcccttgtaaatactttgacaccttttgcaagaaggaatctgaacaattgcaactgaaggcacattgttatcatctcgtctttgggtgatgctgttcctcactgcagatggataattttccttttaatcaggtaagccatctaattgtttcatcttgattttaagtttattcattccagttattcctttggaaaaagagtccatggaaattcagtttgggcagagcaggaagtccatttttgtatgtgtattcagaccaactgtccccctcctccctctcctcctcttctcctcccctcccctcccccctcctctctcaaccttccatgaactgaaatcaggtttgttttgcagttcagcattttgatagaagatgggattctttggcctgaaatagcttggcatctggccagttcttgcctttgcttgccttcatcctattcaaggtcccttttgatcctgttgaagccccctccttcactggtgctttggaagtggactagctggctgggaatagaggtcatattgttcttaaggacggagcaaaaattagatctcagttttaactccacaggaagaaagaaggcagcggggctgctgctggagcctagcattgcaggggtattcagcttcctgaggctgaggctgggcttttgagaagaaatgcctcatgccttgaacaaggaaggggcaatgatttccgccccccacctctgccaactcctattgagccacactaaaaaagagcttgagcagagtggtaaagagtccccttttctatccaatgccaaataggaaacattgacttacttttacttagacagaggtcacaaccagcaatgatactgcagatactgctcagttcctagtgtgaaccgtcttgcttttcagaacagcataagaattatttctgagtggaggtgaggcttgtccaaatgtctttgctatcatggatttcctgactcctacctgtttgaggtatgtgtttaaagacccgacccacttgctgcatttacttctcatttctttttgttctctttgattactcactggtgattgttaacaaatcggtctggagtggtgggtatgtgcttttcacctgtccaatgcaacaattaagtcaaggcagggtatattactgtcaatatgtgcatgtgactaaatatttctgagtgcagtagcaaacttgcaaattgccaattgctgttgctatcacacctataaaatgtgtcttcttcttctatggatttacaggttcacgtggtatttctgatgcgctagtatagtaacagaacatatttctccaaaaagcactttaaatcatcccaagaggatgttgccagacagaaataggaaaattccatgctgaggttggtgattcctgctttagtttctcctgcccagagaagtgggtagcttacctttcctatttgctgcaatacctggcacgccagggtgatgcaactgggagcttctgcacgttcgcggggcatctgacattcttctttccctcagctgtgcatttcaggagaatgactgtggtgaaaaactcttttaaaactctcttttatgattgttgcttttgtaattgcaatgaagcaattacaaaatcacatctctcttctaggaggagttttgcaatttaggccttccttcacaaagctcctggaagagatttttagctggtgtctattttaggaacataatgtgtagacaggaatgaatggccacagagatttacgggaaaccaatttcttggagagggtgaggtaacattataaaccactagaacagagcacaagtggctggttatatcacatggacccagcaatggaattagttttcattaaactcactgtaactcatttgtgtggctgtttttcctccttccttcacattgtttgtctgttttgtttcaaatatctatataggaggccaggatacccagagtgttcatactggtaacaataacacattggattttgctgccaatactaatagacttggtttacatgccccctcttgctgggaaatgtgctgtctggagagtcatttattatggtaatttctctttaagacatggcaggagggattgtccatctatgggctggggcaaggcggggcacaattggaggcctagttaattatacagtattcaagaaggcactaaggagctcagtcaggattctgttgtaccaaccagagataccaggggcaaccagaccgactagatacccaaagtaaactctatcaccaccaacagaggaatccagtaagaaacattctagttccttgtatagagggtactatcagggaatccagacaatcagagagggtaaacacaagagcacctcatctgggaattgctgacgaagaagagaaaatctggggcttgcttggtgttacctctaggacgtcaccaaccaggcatttctcaagggtttatgtcggtgtgagcctgacagtgacacacaaaagcatccctccaaaatttagcctggggaccttgaaaggtattgctttctccctgggcagttggagaggctgaacctactattttctccctgtactcgccaaagggcacaaagcctactctcttccagctacctcagaatggggagggtgggagaaacagatcccagagaaggatgggagagaatcagcaattgaaggtcctgtatagtcaccctcagggtcaatggggctgtgctccgtgaggttatcacttcctttttaaattctaattagtgaatgaagcatgttccaccgctcaattgagattgcattagtttagggtagggtgggaagaaatttattctcattgcacttgtgatcagaaaaataagttgtgacagaattccccaagctgccccaaagtttgcttttccaacttttaaattttgtccacattcctagatttccatttattaattgttttatttatcaaaaacatatagcatttactctgtgccagccactatcctaagcagtactttgcaaatatgatctcatttaatcctatgaggtagatactattgttaattttacaggtgacaaaaccaaggcacagtgaggttcaattaacttgctgggttatacagttagtaagtggcagaatccaagcagtccagccacaccgtggccatggcgtctgtgttcttgatgtttgctcatcatccatgtgatggtagagctacagcttagccaagagactcaggactgaagttgggtgcagtcgtacatgtgagctgtaattcatctgctttctgacatgccaaaattccaaaaacagtttggtttagaatgattacccaaatccactccatttgtttgtttgtttgtttgttgtttttttgagacagagtctcactctgtcacccaggctgcagtgcagtggcacgttcttggctcactgcaatttctgcctcccgggttgaagtgattctcctgcctcagcctccccagtagctgggactacaggcgagtgtcaccatgcctggctaatttttgtattttgtagagatggggtttcactatgttggcccggctagtctcgatctcctgacctcaagtgatctgcctgcctcagcctcccaaagtgctgggattacaggagtgagccatcacaccgggctatttgttaaaaaattaaaaaaaaaaaagctctcctgtacaatagaagatagaagggtctgcgttctaagtgcaggaatgtggtgaataaagcaaaattcctacccacatgcagctttcagtctggtgatagagttggacagtaggcaaatcaatgtgcaaagaaatgtcagtaaatgtaagttctttgaagaaaaatactgcaagataaagagatagtgaggatgagaggggcatgcaaacagaaaataatgaaagaggtggagaaaaagtttttttaagcagaaatctaatgaggccaatgatggattgaatcaaaggtgctaaagggtgaagtgcctcacaggtatgaagagtggcacaaaccttgtgggtgatcctgaaagtaaaagaaacgaacagaaatagcaccatagaggtgtgcagccagatctgtggaatctcagagattgggcttagggctctaactgcccccgacttttaaaaaaacaaatcaaagagttatgtcaaataaatttaaaacattcaatgttaacaagttattaggtttaaaaaaaacataaatcagtcattttcacaaaaaaaagttttgagagtttgtaaagttctctgaaaaaatgttgcagttcctagaatgcaaaaaaattgcctcaaaaatgttgaaaagaactgatccaaaggtagtgagttatctcagttgattgttcacagtcagttacagatcaaactccttgttctacgctttcccctcttctcactactgctcttgtctaaaaacttttttaaaaattaaaaaatattgaaaaggtactatttgatgaaaaaaaaattgtttgaatgagatcattggttagaatgatatagtcacccagtcagtttttcttcctccagaaatgatacactgaccaggtgcaggcaagaaagagacactaagcatgaaaaccagtgtttacatcccccatagtggccaggacacaggagctgcttggagggatttgaacaaatctttttttttttttttttttttttttttttttttttttttgcaaatgaatgagtaggaatgtgatttcaaaataatttgataaacatcagctttcattttcatctatgttaaaacttttgttaccatatttttattccttcaagactcatattccaatggtttatctttttatatttttttcactatttgcttcccctcattctcagttacctatggacactgtagttcttctctagaaaatgtgaatttgcttctcttctaacttagaatcaacctgacattttagcttttctctgtaaatggtcaaaagtctttgccttatcatattgcctgtttctcctttggtgctctacctacaaacttagatttaattttgatgaagaatctactctaacttttttcttttgtcacttgtgcttttagtctcatgtataagaaaccgttgcctaatctgaggtcataaaaatttacttctattatttttcaactagttgtataattttagctcttgcatttagatctaggattcattctgagtcaactttttgcatataatgtgaggtaggggttcagcattactcttttgtttgttcatatctagttgtcccagcaccacgtgttgaaaagacaattctttccccggtgaattgtcttattaacattgttgtccatgcgtttatgattttagcatcaattatttcttacagtgggtactagggatatatcttttaagaaaaggtcagtgagattctttgttcttgagaatccacataactttaaagaatcagaaaactgatccatatacccttaactattaaacactttattgatctaacttcacaacaaaatgtttcttctcattattggaaacatattcatttgtgactccactgaaaatttaaggagataatgagcaaatatttccagggaaaggttatatttattccaaagaaacatatttactgtattgcacatgctttcccaaagttacacaaatattatccatgttctttgtaatatatgttgctagtatgcttttgtttcacagataccattggggaaactactgaacttgagatagaggtgtgccattcaaatagggttggtttctgtattagttaacttgggctaccatgacaaagtaccacagacagggtggcttaaataacagtatttatcacagttctggaggctcgaagtccaagaacaaggtactgggaagtttggtgtcttctaaagcccgtctccttggcttgctgatgtctgtcttttcctctgtgcatgtgcattcctggtgtctcttttctgtctaaatttcatcttcttttaaggacacaagtcatattggattgtggttcaccctaaaagtctcatttcactaaaccacttcttcaaaggctctaactcctaacacagtcacattctgaggtaccggagtttgagactccaacatatggatttggggaggatacaattcagcctctaacagttgtctctggcaatacttatgactactaaaatcataagcaaagaaggttaaattgatatttttttgttgttgatgaaactgttgtggttattttataaatgatggattttcattattcataccctcctcctactggataataatgagttatctgtgtatgtgttaagattctaataaaggcaattaattaggtttgtaattacaggcatgatgactaacaaagtgggggcagaaataaaatgatggtgacactgattccactgctgtgcctataatgtcacatttacattcatgatctgtgataagaattaagatgctcatttatttcagtgaggaaagtgacagaaaaggatataaaattaggaattcatggggaattggtaaaaaaaaattaaagtattacaataagtaactgaaactgactcaggttaatttaagtataaaagcaatgtcttcaaaagatattatagttcacagagttaagggatagctacaatctagactgaaaaatgccaggagcagagaaaactataagagcagatagcccagttggtagacttttggtggtttctgtaaggtgctgtaatctagaatgaatcagctcaactgctttcaggctctttgtctttctttctttttctttttttttttttttcttttttttcctgacattcatgtttaacaccaaaattccaggaagtaaacatctggttggtcaagtttgggtcatgaatctgatccttttagttaagagtaaacttaactaacagttccttgactgacatttccaccaaactatccccatataggaaaactaattcaacccaaacaaaattggagagattaatagtctacataggccagatacagtggctcaaacctgtaattccagcactttggaaggccaaggtgggcagatcacctgaggtcaggagtttgggaccagcctggccaacatggtgaaaccccgtctctactaaaaatacaaaaaaattagccaggcatggtggtgtgcacctgcagtcccagctactcaggaggctgagccaggagagtcacttgaacccgggaggtggaggttgcagcaagccgagatcatgccactgcactccggcctggcgtctggatgacagagcaagactctgtctcaaaaaaaaaaaaaaaaaaaaaaaaaaaagagaaaagaaaaaagaaaacagtctacatacacaatgctggaaggttgaaagaatggctaaataaatcatagtctaggcaaatgatgaaatattatagtaccattaaacataatgtttcaatgaatatttaattctatataaaattgcccaggttataatagtatattaaaaagtaccttacaaacatatatatctaggatggccccaattacggaaaaaaaacaaacatgtttttccttagaaaaagccctgaagataatataatagttatctctggtttatagaattaggatttctgttttcttctttataaagtttttgttttaaaaatagaatattacatcttattttttcttataataaaagtaatacataaaggaaaaggaacataaagtacataaaaaaggaacataaagtgcataaaacaaaaaaaaaatttaaatagaatattacatcttatttttcttatgacaaaagtaatacataaagcaaaagtaatacataaagcaaaagggaaatataaattaataaaatgatgaaataactcacaattttacacaacaaaattattattgttaataatttattttttcaaatgctttggtattgtttcttaccaaacaatttggcattgttttggtatgttttcttaaaataaagttcaaaataaacatatgttgccttaaaaactagaataaaagtgtacattagttttcaaatagaatttagtaatctatttcatgcaaagatactcattgtatctttaatcaaaatagtaaatttagtttaaattattgatgaaacaattgaatgtttgaatattttgtcttttggaatattaataaaactaggccacaaaccttgtataataaaagtacagtattttgaaaattttgtaacaatggaaaagctttgggaatcggtctaatataaaattagacttgaaatagcaaattggtggtgttctgaaaatcatgttacttggtaacctaagttttctctttagaactcagcacgaattttaagaaatttatcttatatttataaaacatctactatttgcaatgagttgtttttagcaaaacttgacctcaaattgaacatttgagaatactgaagaataaataagaagcacctgtaaatactgacatagtatgtccttaaatttttaaactacttagaaccaaattcatcaagttggcaaaatgaagttactagattatcaaatggaatggcaagtgaaaatgagccagaggtggcagaatggagtaagaagggtaattattagggaatgctgcatttggagatgtgaaattatatgtgttgaggatgtgaggaaagaaatctgtgtgaggagaaatagattattaatgatgtaacttagtaacatcagattaagggtccccaaaccctgggccacggaccagtactggtccctggcctgttaggaactgggtcgcacagtaggaggtgagcagtgggccagggagcattacagcctgagctccgcctcctgtcagatcagtggcggcattagattctcataggagcacaaaccctattgtgaactgtgcatgcacaggatctaggttgtgtgctccttatgagattctaatgccagcccccactccccacaatgtccgtggaacaactgtcttccacaaaaccagtccctggtgccaaaaaggttggggactccttatctagattattgtaaagcaaatattcataattttaagattaaagaaaaaatccaataaagatgagaaaccggatctcagagtttccaattacatattcatagaggaaagaaagctaagagaattctgtcacatacatatttcaatctaagaaattcagtggatttgaaaatcctggaaagagttactttgagacttcacaaatgctaccaggcagcagttttgatattaccctggaatgtgatatgccacttaaaaaggccagtagtattttgggctatgtatgtcagtgtgttgggacaaaaccaaggagaaaacagtccggtgtcaggtctagaataccatcatttcagtgccacctgggcctcagcatttcaggtttcaggtgatttgaggagtctgtgaggtcgcacaataatatttaaggcctttaaagggtcaatcaacttgtacaaatgaaggcaagagtgcctttggaagacattccaaaaaggaagtttgagcatactcaagaagaatctagccactgcactccagcctgcgcaagagagtgagacgctttctcaaaaaaaaaaaaaaaaaaaaaaaaaaaagaaactaaatagaaatcagtaagcaaagaaaaagaaaataggagtgtgatttttcttcctgaaatctctgtggaatagcaaaaagtggaatcttgactgtatcttctctgggaccaaactttatcttactctccctgactctctctctctctctctcttttttttttcattcctaggcattttgttttactctgtttttgcatactctgctgatttctaaccctccttccattcagtaacatataaaaaaaacttttcacagtcatgttctcagaatgttcatagtctttaatgcatatagaatataatccaaaaaatcaaaaaaaaaatttttttttttgagacagagtctcactctattgcccaggctggagtgcaatggcaggatctcggctcactgcaatctccgcctcctgggttcaagcgattctcctgcctcagcctcctgagtagctgggattacaggcgcacactaccacacccagctaatttttctatgttggccaggctgaactcctgatctcgtgatccgcctgccttggcctcccaaagtgctgggattacaggcatgaacctccgtgcccggccaaaaaattcttaatgtgattttagcagttattttcaaaatgtggtccacagatgctcttgcattcccttgagactttttaaatgattcatcaggtccaaactattttcataatgatacaaaaacattatttacctttttcactgtgttgacatttggaagaacaatgaaacccctagccttaacacttatcaagacagtgacaacaaactatactgtcattgtattcttcactgtaattcattcccagtaaaaataagtaaataaataaatgaataaaattaaagccagttgcactaaaagaatgtctttgacgaaacactagaaattaattttatttaatctataccattaagtacacatatttttaatattcagtatacatgaagaaatggaaagtatacatgattaacatctgctgtatatcaacaataatgctggttgtcttaaggtaaagcacttgtgtagttgtttgagttgcaagctaaactagctgtacttccatagaatactatttttatttgaaaaaatgactgagagacaaattgtgattattcaaacagatattgaaaagacaaatttttgaaaataaatggagactgtcattttaaaaatacatttgacaatatttgttgtcagtgacaaaatttggcctttcaagagaaaattattattttgaaaaagatgcatctgccaccatgagctcaacagcttctcaaaacttacagggtttctgatgtgattagtggtaatattaacagatgaataatgaaatcttccaatattttgaagacctgcataacttagccaagcactcatcccattagatctttttcttttagaaatatggttattttcacttgaaatttattttgttgacatgtgatttatgattataatttataaatttattaattgatgtgcttgtgatttttctgctttctaacatggtaaatggcaatacattgaactcattataaagaagaattttttgtttcctcaataatattaacaatcaaaaggagtcttgagacaaaaaaattatgacaaggatgaatttgataattcatcagattctgggacactgaatctgatgaatttgataattcatcagattctgggacactgaatctgatgaattatcagattatctgataaattattcagattaagtttgttgcactgtattagttgagattattataatgcagataattgagtcccccagaattatgcaggatagagaagatatttgtcacattacacaagttagtacatttttcattactgtaatatgagctgcacatatcagtttagttcagtaagttctgtataaagtgagtaaaaattgttgcaaagcaaatcagaggattataaaatataaatgttctaatactcttgttaggactttcatctttcctcacctaaaccaatgtaagaagtttctattggtctttttctaaatgttcacccactcccttccctcaattagaacctgatctccatactaccaccagtgacctttcaaacatgtgggccacatctctactttttaagactgtaagttatatcctggagtaaaagctattcagttattcagcatggctggctttcatgagctgtccaggtttatttcttaccccatggtcgatctaccttaccattagtccttcagaaagaactaattgcatttctgtgaagacctaaagctgtttctatctctaggtctttgctactgcttctttatttggtgaatagccacgacctcttcttccccaagtatgattaatttccttttgtgttgtgcctaggtcctgtatacatttctatcatctctcccactgcactttattgtgcttattcccctgtcttcctctgctatactgtaccttctttgcaatatggtgcagcatattgtctgatgtgactaagtctcattgccactgcctacttccgttttcggtgtctaggttctcaatagaaattgttaaatgaaaatgaaacaaaacaaaaacatttttagggttacctttaatattaatacctgacagttttacattttataggatgctttcgcaaatactgtttttgtagaaatatgcttgaagcatataataatttaaataattcttttatttcttatgcaagtcccaaactcctattctaaactcatatatactatgagtattgaactacttatatatactatgattaagcactgcttttcaaagtaattctgaatgcattttttcttcaaattattactgttagctgtttttacttattcagtgtctgagaaatttgattacttctccttttatcattttgaggtattcttttttgtttgtttgttttagacggagtttcgctcttgtttcccaggctgctggagtgcaatgaagcaatctcggctcactgcaacctccacttcctgggttcaagcaattctcctgtctcagccccccaagtggcggggactacaagcatgcgccaccatgcccagctaattttttgtatttttagtagagatggggtttcatcatgttgaccaggctggtcttgaactcctgacctcaggtgatccacctgtttcgaccttccaaagttacaggcgtgagctaccgtgcctagctcattttgaggcattctttggtctttgcttgagtctaattattagcaaattattcaagtactatattttatagttatggaatgcattgatattatagaaaacagaatatttagaaaagcataaagaagaaaataatatttgtgatctcataatctatgtgattttccccacaataataaaatattgcttttaacatgttaatattttgctctaaaccatttctcttcctgtttgaataatgggattcctatggtgttttcaattttgtagcacatattacatcttaaacattttttaatgccatcagaatagttcaaaagtataatattaatggcttcataatatttccttgtagttttacatttatttaattattctgataatcatggaaattttatttcattttagttgcatcattacttttgaagtaaatttaaataacacattaaaaataccaagaattttacatttttattaatagccaaaagatcatctgttgtataaacagatcccaaaacttagggttttcttgattaaggaaaacagaaggccaacaaagtccatgcagtacacacaagatatagtcaattaacacttaaatctgaaggaaacaattccagtgcatggtttcttgcactgggcttgttctctttctttttgattctcccttctggtcctcactgggagtaggaatcacacaaagagcttggctcactactttcattcactctctccttctctcatcatttgttcaaaatgaacccatttgggctagttctttaatactctcagatgttttcctgctttcagaaacaggcacaaaataatttatatattaacattgaacaactctctgaaaatcattgcattgtttaactaatttctgatttttctaccactttacagcagaaaacaactttcttcttagagttcttgatacaaactttttaagaaatttaaaatatacattaaaatctgtctttgatgagcatactaaataatatgatagctggaagggaggtaaggaagtggtaacagttttaaagttcttatttatttttcaaatatgaatagttacaggtttgttattatctaagaaagagaattattaatattctccatgagatccaaggatcacattatatctcaaaccaaggtaacattagagtgtgaaaaacaattttaattattattttatcaattttaaaaatttttgtatatttgtggggtacaagtgcaattttgctacattgatatattgcattttggtgaagttacggccttcagtgcatccatcactggagcaatgtgcattgtatccaccaagcaacctcctatcatccacccaccttgcacctactacccttccaagtctccattgtgttttatcttaaagtgtagtaattcttgccctctagcaataaccttggtgtatgcatctaattctcagagggtaatctacaatttcaaaactttaaaagtagctgtttaaaattatagcacacctgttattttatatttatgattagtatatatatcggttgttcaagctaaaagacaaatgacaggaaacattttaatcaatagcattcttttagctattatggtaatattcatatttattgggacttagagtaaaacagtcaggaagttggtcagagcaagaaataattttctcattcttttttcatttactagtcattcatttaacaatatgtattgagaacctagtatatttaatactaggtgccaagatatctactcttaagtacttagattctaaatttaaaaaaaagccaagtactactgttttaaccacaccacttctgacatcaaatatgtgggtcgttttgtttttgtttttgtttctgtttttccctcaccactcaattgtctgacagccagttgagtgtcccacaattcaattcaataataacttggcattatcctcagataccacaagtcaatggctcagtctcacaaaactgccccacttcaaacatcagttgcaagacccaggcctctggaacttctgactgaccagctataaatcctccagttcaataatgtgctacaacagctcacagaatttaagagcttactatttccagtttattgtaaaggaacagcctggaagagacatatagcagaaagtatagggtaggagaagctatccaaactccataatttagagtttttatggaggtctcattatgtaggcataattgattaaatcattgaccattggtgattagcttaatcttcaacccctagcccatcccttgcagatgcaggtctttctagtgactagcctcaatcctgaagctatgtaggggccctcagccacttgtcatctcattagcatacaaaaaggcactccagagattctaaagattatagaagctcttatgtcagaaaatggaactaaggccaaatataagaaagatgctgctatcaccaatattaatcaggaaataacaagggttataggagctctgtgccaggcagcaagaactaagaccaaatacaggcacacctcagagatattacacatttggttccagcccaccacaaaaaagccaatattgcaataaagtgagtcacacaagtgttttgatttcccagtgcatataaaagttatgtttacaccatactatagtctattaggtatgtgatagtattatgttgaaaaaaagtgcataccttaatttaaaaatgctttattgctaaaaaatgctaacagtcatctgagccttcagtgagtcatataatctttttgctggtggagagtctcgctttgatgttgatggatgctgactgatcagggtggtagttgctgaaggttgagatgactgtgacaatttcttacaataaaacaacaatgaagtttgccacgttgattgatcttcctttcacaaaagattcctctgtagcatgtgatgctgtttgatagcattttacccacagtataacttgtttcaaaattggagtcaatgctttcaagccctgccactgctttatcaaataaatttatgtaatatctaaatccttttttgtcatttcaacaatgtcctcagcatcttcaccaggagtaggttctatttcaagaaatcactttctttgctcgtctataagaagcaactcctcctctcttaaggttttatcatgacattgcagcaattcagtcacatcttcaggctgcattctaattctagttctcttgctatttctgccacatttacagttacttcttccactgaatcttgtacccctcaaagtcatccatgaaagttggaatcgatttcttccaaactcctgttcatatggatatttttacctcctcccatgaattacaaatgttcttaatgggatctaggatggtgaattttatccagatgattttcaatttactttgctcagatccatcagaggaatcactctctatagcagctatagtcttataaaatgtatgtcttaaataataagacttgaaaataaaaattattcctcaatccatgagctgcagagtgcgtgttgtgctatcaggcatgaaaataacattaatctccttgtacatctccatcagagctctttgcaacattgtcagtcagcggtaatattttgaatggaatcttttttttttttctgagcagtaggtctcaatagcaggcttaaaacattcaataaagcatgctgtaaacagatgtgctgccattcaggctttgctgttctacttatagagcacaggcagagtatatttagcatacttcttaagggccctaggatttttttgactagtaaatgaaaattggcttcaacttaaagtcactggtgacattagctcctaacaagagactgaacctattctgtgaagctttaaagccaagcattgacttctcctctctagctatgaaagtcctagatggcatcttcttttaatataaggctgtttcatctatattgaaaatctgttgtttagtgtagtcaccttcatcaatgattgtattagtctgttctcaccctactaataaagacatacccgagactggctaatttataaaggaaagcagtttaacggactcacagttccacatggctagggaggcctcaaacaatcatggtggaagatgaaggaggagcaaagggatgttttacatggtggcaggcaaagaaagtttgtgtagagcaactcccctttataaaaccatcagatctcctgagacttattcactaccacaagatcagcatgagaaggacctgcccccatgattcaattacctcccactgggttcctcccatgacatgtgggaattatgggagctacaattcaagatgagatttgggtggggacatagccaaaccatatcaatgatcttagctagatcttctggataacttgctgcagcttctacaccagtacctactgcttaaccttgcactttaattttatggaggcagcttctttccttaaacctcataaaccaaactctgctaacttcaaacttttcttctgtagctttcttacctctctcagccttcacagagttcaagagagttagagccttgctctgaattaggctttggctcaagggaatgttatggctggttcaatcttttgttcagactttcttcatatcagcaataaagccattttactttcttatcatttttgtgttcactggagtagcacttttaatttccttcaagaatatttaagaatatttctttttcattcacaactcggctaactgtttggttcatgaggcctagcatttggcctatctaggtttcaacatgtcttcctcacaaagcttaattatttctagcttttaatttaaagtgagaaacattcaattcttcctttgacttgaacacttaaaggccattgtagggattaaaaaaaaattttttttatttgtatggctacatagtaggtgtatacctttatgggttacatgagatgttttgatacaggcgtatcatatgcaataatcacatgagagtaaatggggtatgtgtcccctcaagcatttatcattactttgtgttacaaacattccaattatactcttttagctatttttcaatatagaataaattattgttgactgtgataactgttgtgttactagatcttattctatttaactacatttctggatcttattctatctaactacatttttatacccattaatcattcccacctccccaccacccacatagtagggttattgattggaataatttcaatattcttgtgtctcaaggaactgggaagcccaaggagaggaagagagacgggaacagcatgttggtggagcagtcagagcagacgtaacaccaattaagttcactcttatttgggtgcagttcttgccatccccaagcaattactaaagtgacattaaatattactgatcacaggtcaccataacagatataataatagtgaaaaagtttgaaatattgcaagaattaccaaaatgtgacacagatacacgaagtgagcacatgctgttggaaaaatggcaccaaaattgacttgctggatgtagggttgccacaaactttcaatttgtgaaaaactgtatctgtgaagcacaataaagcaaagtacaatatgtcaaggtatgtatgtatatacttcttatgataagaccacaccaagtatataaaatattttctaaagatggcacttgttacttctttgagactctcaatgtgttgcatactatgtttaagcttcaaattactgatcttaaggaaatcaatgttcttatctatctgtactgttatcttgatgtaaattcagtagtgtacctagttagtcagagtaggatccaaaattccaacctaaattttgaaacaaagatttttctttattataacgcccaacataacaccaagagtagttaataaacatactaagatgaacaattattcttgactttaggcaaaaagaaaattactaaaagatgtatttattaatcaaatgctgtaatttttgttattatttctgtaaagttctaaactccttgaaatcctatagaagagaaaagaataaaaaattgtcaaggcattctgattcaaacagaaaaagaagggaatcaaataattatcactgcttacatgattatcattgtagttttagctccttgttagttcagtgcttttttgtatatttatagagttgtgcagcaatcattacaatctcattttagaacatttccattgagctaaaaagaaacttgatgcccacttgtagtcactctctattcccactcccagtcctaggcaatcactatttgctgtctctgtacatttgcttattctagacattttatatgaatagaatcatgcaatgtgtcatcttttgtgactttcttctttcacttaacataatatctttgagattcactcacctaacagcatgtttcagtattcattcattttaattgaccaatcatactcccttatatggatataccacattttgtttatccatttaccagctaatggacatttgggtgctttccacttttgggctattgttaataaggctgctatgaacatgtccatataagtcttcatatggatacatgttttcatttaccttgattagatacctaggaatgaaattactgggtcatataatgaatctatgtttaacattgtaagacactgccagtgtatttccaaatggctgtaccattttacattcctactaacaatatatgagggttccagtttctctatatccttcccaacacttgtgattatctgttttttttattattattatagtcattccagtgtgtgtgacgtgatgtctcattgggttttttatttgcatttccttcatgattaatgatgttgagcatctgatgtgctcgttgattagtcatttatcttctttggacaagtatctacccaaatcttctgcctatttttatagttaggttctttggggttttttattattgacttgtaagagttttaaaatatatatatatatgccagatacaatcgcttatcagatatatgatttgcaaatacgttctttcaatctgtgggttgtcttcattttttgatgttgtcttttgaagggcaaatgattttttatgaagtacaatttatcaatgttctcttttgaccacttatgcatttggtgttgcagccaagaaattattaccttatgtatgtgcaccatatttactcatatttttaaagaattatagttttagttcttacgtttaaatttatgattaattttgaattaatctttgtacattgttatccacagtttcaaatccttccttttgcatgtggatatctggtttttctagtactagttgctgaaatgattattctttcccaattaaattatgttagcacccaaagctgaattgataaaaattgttagccaagttgtgttctcttcttatttattcaagaatggttcagaataagaactattgctactttacatgtgtcagatatctaaatattaagaaaagtatgtgatcactataaaattcatactttccagtaaattacatttaccatacaatgttcaatactgtaacatattctgtattttaacttttgatttttttttataactgttgaattttgaactatcgtgttttgtaacctctcactcttaggtgttgttattccaaatattttattaattaattcagcaactattgtgtgactgttatgggtaaagtactttgcacgatacagtgaagaatgcaaaggtaaatgctgctctcaaggtgcttatggactaaagcaaaaaacaagacatattcacaagcaaatatactgggaggtagaagtcagtcgtcaagtaacaccagagttgcagataaatgcttatgtgaattcgaagattacttgctttttgtttcagaaaagtgctagtggatgaagagatcaacagcctatatgacagcaaatttggttccatgttggtctatacaagtagttaagggcaaagaataagcagtaagtttctgatgaatataaataaaatgtatgtagctgttaagaagtatagtctgtgattttaaaaaaacatgaataatgatattcatgtacaagacatgacagttaccagtgtattgcctcttagctctctttggtagctaaccagaaatagtgtattgggcacttaaagcatttttcttagaccgtgagcataacgttactctttgtcagtagagggcagtgaagggtcactgcaggaggaaggggcttctcttcctggttctaatgctacattttgattttacttcgatcattagcaatgtggaccattagcaatggaccattggcaacgtgcttgtgtaatgacatctggtggtgtttttccccagccacatgcccagatggggcagtctgttggtgacttcacagcctctatataagggcctagtgaccactttgccacagttctcccagcactgacaccgcacactgccaacacagacacatcctcacttcagtgccgcactccttctgaaggcccacccaccaaccttagctcacctgtgccctaaagaattgtttctgcttgcccaacagtagcccaactgtggaccagagctccggccaggacaccccagcaaactattctgctgtagagaaagagggcttccaccacacttttcccaatgaagtttggaccccaaccttgggatgggaaatccttccagttcactcttctttgagtcctctaccttagctccaggataccctttagattctcttacatctttatggttactctcctatcagtacttaataattcttcatatattaaactttctctgtttaaattagcatgtggtttctgtatctttttttgtttgtttttgtttttgttttgagacggagtctcgctctatcgcccaggctggagcacagtggcgcaatctgggctcactgcaagctccgctttccaggttcacgccattctcctgccttagcctcctgagtagctgggactacaggcacttgccacccagcccggctcattttttgtatttttagtagagacgggttttcaccgtgttagccaggatggtctcgatctcctgacctcgtgatccacccgcctcggcctcccaaagtgctgggattacaggcgtgagccaccgcgcccggcccggtttctgtatcttgattgtgtcccagactgatacctgttgccacaagttattttgctcagttaatattactgattttcaaatgcttcagtttataggggtaaagacaatttcttgatgctatccctgaaaaggaattggacaagtttaacttatgtcatcttctcatgggcttcatggaaaatagcctttttcactagtgaatattggatatgctctagcatttccactgagaaataaaaattaggcattcattcaaaaaagtgtgtttgatcctatttctaattcaaatgctttgattattattgagttattcatatagtagattttctaaggattaattgtttttggccaagataaaccaaatgtggtagatgtaaactattttcatatggtcaaatacgtgatgattattttaatataaagggtttcactgaagcataactacaatgtaaagggtttcactgaagcataactacatatgtagaagttttaatgtgtatgaggtctgtaattcataaaattgttggttgattctttctgtttcacttctattggcaaaggtttaatttacattcaggcctggtggtaaccctgttaataaccaaattcattctctcattttaaacttataacttggcaaaagggaaacccttgatgaagttgtttttaaacttttatgaatgattctttttaacctttttaaactctgaaaccttttaaaagtgaaaatattcatcactttctaaagagtatccactttgtaaggtccaggtacagcaagcaaatatgtataaaacattaaattaagaaaacttcacactttttcctctatagcaaaaatcctaaggagtaagacatatgatataagctatttcccctaggacttcactgaggttatttgaaacatatcagaagctgagaaattacgtcatttcttttgctatttttattccttgaggaaataacttttttcaggaccatgataccaattcttttcttctttacaagcattcctgtgctttcttacaacagcatactggcaacacaaagtagccaaatcggctctaagacaaatgtctgtgaaggctgttggctgagaaatatcatttggcggtctcatagtctcatatataaaatgtaccttaatttttttatttttttgagacaagatctggctctgtcacgcaggttggagtgcagtggtgccaccttggctcatgcagcctccacttcccaggctcaagcaatccccccacctcagccttccaagtagctggaactacacaaacgcaccaccatgcctggttaatttttgtattttttgtagagacggggttttgccatgttgcccaggctggtgtcgagcttgtgagctcaagcaatacacctgcctcagccttccaaagtgatgggattacagatgtgagccaccatgcccagccccatttactttttaaaccaccacaatcattattatatcgtagcactctaggttcacagaggtgattagggacaactatgttggtaagtcaatgaactctcttctgttcttaccttactagattatgctgtaacattagacaatgttcatcattatctctttcttactctctcttccctgttacttcttctagaaaatgggtctttgtttgtattctgcaaagattaaagttgaattctaacaatgaaagcattcattttgactaaactctagttccataatttttcttagaaagtattggcaaatctgtttatgtctcttttcaattatttttcctactatctctatataccaccaataaaattaactaactaaatttagttttatttcaaatcactcagtggttcttttattcaaaagatattaataagcatagtgtcaggcactatgccatgaacagagatacatttccaggaaattgatataatggaaagaaactagggctagagtcagacaaatcagctctagctatacactgctctagctatacacagtatcactttaattagctacattttttctgacttttattgcttcatctgtaaaatagtgataataatatatattttcacgttgtatggtaaagtctaaagttatgttcaccaatacataatgcagttcttggcactgggtagatgcttttaaacactattagtgttctttatggtattttttctaagtgactaaaagatcatattaattttacatgcctcacatgtcctcagtcctttacctttatcttcctggtgaatttccttttattttacaaaacccatttcagctctcacctacttaggaagcttctcttaacatttttccccctcctcatatcccaaaagaagtgattatatcctcttctgtgcttcctccgtgtctcaaagataacttattgttatacttcctcagtatttatttatttatttatttatttatttatttatttatttatttaagacagagtcttgctttgtcacccaggctggagtgcagcggtgcgaactcggctcactgcaacctccacctcccgggttcaagtgattctcctgcctcagtctcccgagtagctgggaccacaggtgcctgccaccatgcccggctaaattttgtgttttcagtaaagaccaggttttgccatgttggccagactggtcttgagctcctggcctcaggtgatccgccctccttggcttcccaaagtgctgggattacaggcgtgagccaccgcgcccagcctacttcctcaatattataatatattgctattcaactgtgtctggcctaacagactgtctgctcctctagaacagaaaccgtcatatatatatatatatatctcccaaatctaaagtcaggcttgaaatctaataggcagctcaaaaacaatttattcttaaacagaattgaacaatgccttaaggtacaaaagttgtgcattatccacaaaatagctcgaatattactgaaactttgttgaatggtattttctctgaagcacccatgttgcttcaaaggacatgcttttgttcttatttatggctgtgtaatgttccctagcatatatgtaccacattttctttatccagtcagccattaatggacatctaggttgattgcatgccattgctattgtgaatagtgctgcaatgaacatatgcgtgcatgtgtctttttggtagaatgatttatagtcctttggatatatacccagtattgggattgctgggtcaaatggtagttctgttttcatttattctgagaaatcttcaaactgccttccacagtggctgaactaatatccattctcaccaccagtgtataagtgttcccttttccccacaaccttgccaacatctgttattttctgactttttttttttcttttttttcttttttttttttttgagatgtaatcttactctgtcgcccaggctggaatggagtgctgtggagcgatctcggctcactccaagctccgcctcctgggttcacgccattctcctgcctcagcctcctgagtagctgggactacaggcgcccaccaccacacccggctaattttttgtatttttagtagaaatggggtttcaccgtgttagtcaggatggtctcgatatcctgacctcgtgatccgcccgcctcaacctcccaaagtgctgggattgcaggcgcgagtcaccgcgccccgcccatgactttttaaaaattgtcattctgactggtgtgagatggtatctcattgtggttttgattttcatttctctaatgattcatgatgttgagcattttttcatatgcttgttggtcacgtgtatgtattcttttgagaactgtctttttaattctttgcccatttttaaatggggttgtttttcacttgttgatttatgtaagttccttatagatactggatattagaccttcatcatatgcatggtttgcaaatattttctcccattctgctggttgtctgtttactctattgatagttttgtttttgttgtgcagatgctctttattttaattaggtcccacttgtctatttttggttttgttgcaattgcttttggagactttgtcatgaaatctttgccaaggccttaatcgaggtatttcttagttttcttctagggtttagagttttaggtcttacatttaagtctttaatccatcttgaactgatttttgtatatggtgaaaggaaggggtccagtttcaatcttctgcgtatggttagccagttatcccagcacagtttatttaacagggagtcttttctgccttgcttgctattatcgattgtgttcaagatcagaacgtcgtatgtgtgtgactttatttctgggttctctcttctgtttcattggtctatgtgtctgtttttttttttttttaattatactttaagttttagggtacatgtgcacattgtgcaggttagttacatatgtatacatgtgccatgctggtgcgctgcacccactaactcgtcatccagcattaggtatatctcccaatgctatccctcccccctccccccaccccaccacagtccccagagtgtgatattccccttcctgtgtccatgtgatctcattgttcaattcccacctatgagtgagaatatgcggtgtttggttttttgttcttgcgatagtttacagagaatgatgatttccaattgcatccatgtccctacaaaggacatgaactcatcattttttatggctgcatagtattccatagtgtatatgtgccacattttcttaatccagtctatcattgttggacatttgggttggttccaagtctttgctattgtgaataatgccgcaataaacatacgtgtgcatgtgtctttatagcagcatgatttatagtcctttgggtatatacccagtaatgggatggctgggtcaaatggtatttctagttctagatccctgaggaatcgccacactgacttccacaatggttgaactagtttacagtcccaccaacagtgtaaaagtgttcctatttctccacatcctctccagcacctgttgtttcctgactttttaatgattgccattctaactggtgtgagatggtatctcattgtggttttgatttgcatttctctgatggccagtgatgatgagcattttttcatgtgttttttggctgcataaatgtcttcttttgagaagtgtctgttcatgtcctttgcccactttttgatggggttgtttttttcttgtaaatttgtttgagttcattgtagattctggatattagccctttgtcagatgagtaggttgtgaaaattttctcccattttgtaggttgcctgttcactctgatggtagttcttttgctgtgcagaagctctttagtttaattagatcccatttgtcaattttgtcttttgttgccattgcttttggtgttttggacatgaggtccttgcccatgcctatgtcctgaatggtaatgcctaggttttcttctagggtttttatggttttaggtctaacgtttaaatctttaatccatcttgaattgatttttgtataaggtgtaaggaagggatccagtttcagctttctacatatggctagccagttttcccagcaccatttattaaatagggaatcctttccccattgcttgtttttctcaggtttgtcaaagatcagatggttgtagatatgtggcgttatttctgagggctctgttctgttccattgatctatatctctgttttggtaccagtaccatgctgtttgggttactgtagccttgtagtatagtttgaagtcaggtagtgtgatgcctccagctttgttcttttggcttaggattgccttggcgatgcgggctcttttttggttccatatgaactttaaagtagttttttccaattctgtgaagaaaggcattggtagcttgatggggatggcattgaatctgtaaattaccttgggcagtatggccattttcacgatattgattcttcccacccatgagcatggaatgttcttccatttgtttgtatcctcttttatttccttgagcagtggtttgtagttctccttgaagaggtccttcacatcccttgtaagttggattcctaggtattttattctctttgaagcaattgtgaatgggagttcactcatgatttggctctctgtttgtctgttgttggtgtataagaatgcttgtgatttttgtacattgattttgtatcctgagactttgctgaagttgcttatcagcttaaggagattttgggctgagacaatggggttttctagatatacaatcatgtcgtctgcaaacagggacaatttgacttcctcttttcctaattgaataccctttatttccttctcctgcctaattgccctggccagaacttccaacactatgttgaataggagtggtgagagagggcatccctgccttgtgcccgttttcaaagggaatgcttccagtttttgcccattcagtatgatattggctgtgggtttgtcatagatagctcttattattttgagatacgtcccatcaatacctaatttattgagagtttttagcatgaagggttgttgaattttgtcaaaggctttttctgcatctattgagataatcatgtggtttttgtctttggctctgtttatatgctggattacatttattgatttgcgtatattgaaccagccttgcatcccagggatgaagcccacttgattgtggtggataagctgtttttgtgccagtactatgctgttttggttactgtagacttgtattatagttgggtggtgtgatgcctcagacattgttctttttgtttaggattgctttggctagtcaggatctttttgggttttatatgaattttcaaatagtttttctaattctgtgaaaaatgacattggtagtttgatagaaatagcattgaatctgtaaattgctttgggtggcatagtcattttaacaatattaattcttcctacccatgagcatggaatgtttttctatttgtgtgtgccatctctgatttctttcatcagtgtttcataattcttgttgtagagatctttcatctccctggttagctgtgttactaggtattttatacttttcgtggctatcgtgaatgagattgcattattgacttggctctcagcttggatgttattggtgtatggaaatgctactgatttttgtacattaatttttcatcctgaaactttcctgaagttgtttatttgatctaggagcctttgggaagagactgtggggttttgttttctaggtataaaatcatatcattttcaaagagagatagtttgacttcctctcttcgtatttggatgccttttatttctttctcctgcctggttgctctggctaggacttccagcattatgttgagtaggagtggtaagagtgagcacccttgtttcgtttcagttcttagggagaatgctttcatcttttgcctcctcagtatgatgttggctgtgagttggttatagatggctcttatgctttggcctaatttgttgagggtttttaacatgaagagatgttgaattttattgaaagccttttccgcatcttaattaagatgatcatgtggttttttgtttttagttctgtttatgtgatgaatcacatctattgatatgtatatgttgaaccaaccttgcatcctaggaataaagcctacttgatcatggtggattagctttttggatgtgctgctgggttcaatttgctagtattttgttgaggatttttgtgtctatattcatcagggatgttagcttaaagttttcttttttcattgtgtctctgccagattttgatagacagatagatatttcttgtgaattgttacaaatgcaagagaagaaaacttcatccaaacaaggcagattgcatacaaatatttctacaatgacctctatttatctagataaaagttttctaattctacaagactctagaatacaacttcaaatagaggctaggtgtgatagctcatgcctgtaatcccagaaatttgggagaccaaggtggaaggattgcttgaagctagtagttcaagatccacctaggcagcaaagtgagaccctgtccctacaaaatatttttaaaaattagctggtcaggtgatacacatctgtactccaagctactgaggaggctgaggaagggatcacttgagcccagtagttcaaggctgcagtgagctatgatcatgccactgcacgccagcctgggtgacagggcaagaccctatttttttttaattgaatacaagtacctttgaacataccaaatataattttatatctcttatttcaaagtgaagtctagataatctcacgtataagcatttttttaaacatatagcagatctctagagatggtgtttatctgattttcaaaccctggcatttagaaaaaacaaattaataaagactaaaggatgaggtaggcattgagatttctagaactattaataggtttccccttctaggaaggaaggtgaaaaaagtttcaaaaatagaaacgaagtgtaatcactgtacatttgtaaattgttaaaaaagaaaacattggaaggccaaggcgggcagattgcttgagctcacgagttcaagaccagcctgggtgacatggtggaaccctgtgtctactaaaatacaaaaaattagccaggtgtggtggcatgcacctgtagtcccagctacttgggaggctaagccaggagaattgcttgaacctgggagagttaggttgcagtgagccgcgatcatgccactgcactacagcccgggcaacagagcctgaccccgtctccaaaaacacaaaaacaaaaacaaaaaaaacacacacaaagaagaaagaagtatatagtattttagatttacatcactaatggtgaacacttagagtgttttgttaagtctagtggtaaactttatgaaagggcaaatttggaggtctagatttcagaaaagtgattgaagaactttaggactttcatcttaactcagtatcttcaaatttcaataaaaacaaaacaaaaacaacaaaaagtcacacatatattaaaattaatagtcacctagaatagcatagaataaaattactatgaccttgtgaaaagaaattgtcagatcaatgtaattttcttttgagttgaagcaaaatgtcatgttgatcaagaaaaaaataatggataccacttatctgtgctttaagaaggtatttgcatatctatacatgtatatgttcttataaaaaacatgatctctcaggctgggcgcagtggctcacgcctgtaatcccagcactttgggaggccgaggtgggtggatcacgaggtcaggagttcaagaccagcctggccaacatggtgaaaccctgtctctactaaaaatacaaaaattagctgggtgtggtggtgggtgcctgtaatcccagctactcgggaagctgaagcagagaattgtttgaaccagggaggcggagcttgcagtgagccgaattcacaccactgcactccagcctgggcgacagagcgagactctgtaacaacaaccaaaaaaaaaagtgatttttcatccctgatttccaactttcatatcagaattatggactaccatatgaatgaaagaaattgaactttcagtgtcagttgatagtaacaatagacattgactctcaaaagtcttctgtggagtcaataactctttgagagaatttgcattttattaaatacttacatttgtataatttaaaaagaatatagtgtgaatgtttgtaagacatgtatttaacatgaatccaaaactggagtgggacattatgaattcttgaaaactttagaataaatctgggcctaattttctgcaattattcatctgtatcatattgcttttaggggagggttcaagtggttcaaggtaagtaatgatgattttatgacatcctggaaaaatatattaattaccatttatctaaattaatctaaagactattaccatttaatagtttttcatgctgggtattgacattaaatataaattttaagtgaaactgatattaatagctctgaggaatgtataaataggaaacagaataaccttgaaacctttaggaattggcccatcaaggcaagtgagactctagtgtcaagtttggttagcgtgtagtatattttgaaccaagaacaaactatacaaataacaggatggcagagaagctaattagtcacaaatttggtagaaccaataaggctcttttatttaacaggcatcgttgtttctgattgatagcaggaagaacaggagaatcatgggatcatgggatatttttatatttaaagatcagttttattgtttcaatccccctttgttaaaatgtcaaactggcttgtacaatgacaaaggctaaataaaggtattatattactaaaaaacttgacacagtaattcgtactaagggaaatgtatacaaaaatcagacatcatctttttactgttcttatcaccattattctattacagtttctaccctaaggagattagtgaagttgggcagaaattagaagggagcaaaagaggaatacaaataattatatcatacctatgggttaaaatattgaaaatttttcagcttggaaaagagaaaactaaagagagacataataactgccttcaattgtatggaggtttgtcacaaggagggtacgtaattgaatttttatccctatggaaagataaatcatttaaaatgggtataaactgtagcaatggggagcttatttgtttgttttctatttccaaaaattatttgatctgacttacaaaatcaaatacaatataaagcagaataataaagaccaaatgatctaaaaggagtggtgaaatagatgttgccaaattcagaagtgtaactgcaatttttgtttgatcctgattttggcattgtgtttttaacagctgaaggggaagggtaggagcacatggagggttacatagatagatcccatagactacacaggaaaggagcacactgcccatctctgatagccctgtaccctcaagagtataactgagcatcgttgaagtttaataggtcctttggtgtttggttgtttggttgattggtatttaatgatcttttgttgttgttaaattctattctactccatgcgtagcaactaaattattagaagatgaaactgctagtaagatgccaactgaatagaactttctggtatttttatcatatccaacttattttctgcatttggccctactttgaaacatctaaaatgctagatatttttatactaagattctttgaattttggagtgcaacattcagaatgttattccttatttctgccaagagattatataatgacatataaaactgtgactttatgtggaaaataaatttgactcaatttaatattctgggcacaacttactatcaactacactaaaacttgttctgtctggcagatattctctggggtctaaattgatcatttaaaaggacactttcaaccactcaactcattaagtggctcagtgattctgtttgcaagtagtccattccaacacgtctatcagtatacaattctcaaaattagtcgttctccaagggtcattccttgttttctcatttaatatttaaggtgtaataataatggctttctttttttcttatcagatgttttatccatccttcataacatagatctctggtatcccaacttggtatttgtccaagtacttgaaataatgttaaagatcatttttgtgtgtgtgtgtgtgtgaaagatttgaccgataaggattcttttagctattttcatgaaaaagtggaatgactcagtttctcaatgtgaaaacatattggggtcataagtgtttctaatgaaatatcagtcttgctgcctgaatttctggttttaaaacaagagcattgaactgtgaaagattagacccggatttaaatctcaaacttcctccaaactgtctgacaatggtcatcactttattaacttgtgctatttaactttgctgaacctccatttttttcttttgttttaaaacaaaagttaagaacatgttatgttcagtgtttttacattgtgcttttgtcagaacacttgtattcaaaacataaaggcacatttaagcgggtataagtaaaatggtttatttattataagaattcaggccatgcatggtggctcacgcctgtaatcccagcactttgggaggccgaggcgggtggatcgtgaggtcaggaggttgagaccatcctagctaacacggtgaaaccccatctctgctaaaaataaaaataaaaaaattagctgggcgtggtggcaggcaactgtagtcccagctactcaggaggttgaggcaggagaatggcgtgaacctgggaggtggagcttgcagtgagcccagatcacgccactgcactccagcctgggcgacagagtgagactccatctcaaaggaaaaaaaaaaagaagaattcaactgaaaatcccataggccaaaacccaagtaagccataaagagattaaactggaatgagaagtccagaaacatatcaacacagcctacattctttctgaatgcttgcatggctactgttatttctgttttttttttctgctttggccgatatcctctgcttggtcatggccagacatagcttcctcatcctcaactctaggtcatgcagtgcatcttctcataacattctgactcactcactcttacttcatttaaacatcacccagaaagcaaattctattgtttcagttaagcctatagatgagtgccccgtgatcagcgtcctcataaaacctaccaagctgtggccatgggaaaggggtgaaagagtcacatggtataaacatagtttatactttcagtatgggttacatggaggacaatttcaaaaaaggagtgagggctgagttggcacctatcatgtgttattataaaaattattcccattttataaatgatagaattgaagctaagcaaggccaaggtactattttaatatcacagttttgttaaggactacaaccaaattttgaacctgactattcttattctaagtttaatgatcttatcacaaaacttacctggttgagaaaataaatctccatgtaagaaatgattttttcctacctgagcatggtggctcatgcctttaatcccagtgactcccgatgctgaggcagaaggatcacttgaggccaggagttcaagactagcctaggcaacatagcgagacctcatctgtacgaaacaattaaaaataaacccaaaagatatgacctgttctaacatttaaattaattgaattatggatgcatctttaatcaacaaaccaatacctgcatgaatcgactcagtcccttaggtaccaaaagcttgcttttttatatttgtaatggatgcttttcctagaccattctctaaaacagtgtttctcaaaatttgcccattcattaactatgagtgctacatcctgatcacctggacaagcagtttaaacacagattctaggtccaccttagatctctgaaacaaaatcttgaggtgggaccttggactatgtgttttcaaaaagatctccacatgatttttatgaatgcaatggtctatattttcaaagtgtagtctctactagataaacagaaagcaatatgccatattatttaagttctccacaaagacgccttcgcttaattaaaatttggtattacattcttggattttaaagaaaaaaatattatctgaatgaagctctaaacagttgttttatggctacatgttttagtttccttagtttgatgataacacttgtgttagaatgagatgggtgggaaggacagtgacatttgcccttcctatagcccgtgcactgagcaggtgacctaggataaggcattgatcatgaattcagttattcattcattcaaaaaaaaattactgagcacactgtggcaaacattttggtttcttcaatatgttgcatagaatgattatgcatacaattctagtggcgtggggaaagaaacattaagcacaagacgtttagttgatttcattattgcactaaagtatttgcctttttcaaggctgaagttgacttctctgccttcctgagccatagggaaaagggtcttgtcttgcttatgcagccagcaagatgtatcggtttaagaaaagtgctgagtaatgcctgcaaatatagcaggcagtcagcctcttctctgcagcttggttcatgtcctttacccatgctatttaacccctgatgtttttatatccctatttctaaactcaaaatgaacctcaaactgaataaggcatacaataaatgtatccatattttctttattcaattcagtagcatctaaatccctcttgtgaggaccctctgctttggtcattagatagttaaaaagatttaaaattgctatatgtctagtttctaaaaattgctaaatgattttctaaggtaaacacctttccgtgtatccagtgcttaacagaattaatgttatgtgagttttcaaaaaaaagaaaggaaaaaaaggaaatctcttttttgtctcagccgacagcaagcagtgctgctccggaaagaaatgattttatttctagcctctctgcagcatctccctaccgcattagtatgttgctgcaaagctatccattgtgtaactttccccatcagtcagtcagctgtgtagttctctttcctatgaaatcgttatgccacaggagacaaaaataaaaatacaatgcaggttagttcattatatcctgacatctgtttcatgcagattgtgatgcaataaaatattagtaatttaaacagaatgtaattgtggtttgaaatcacttgggtaaatcgtgttattttaaaacaaatcttaggaaaatgaaatttaaactttgcactatttgattaggattaacaaacaagaatatgaataaaccaatagatataaaatattagactttagtacttagaatatgttttaagagtttgcttctagtataagttttaattaacaattattcattagctgaaaatttttgaggacctattaagtacctatcactcttctgggtaccatgggaggtgaaaagggggtttaaagtttgtggcgaatgtatagtagttacattttatgagaaaatgtctcatacctagtgactggtaaagacaataaaggctgtagaccctggtgactagtgaagaacctatggcctggcttctgcttaaagagagctcaatgttgcaaaattcctatttgccctttcacttttgctagaagtgtattgcatcacttgtaagattaaagggaaaatatacttattttgtttcccaaaagtttataggtttctgactttcacaaatgcttaagagtactcttctctttgttgttatggctgtccacgtgtagcagtttcatctttagaagtttaaattcttttctctttcttgctggatacaatggctcatgcctgtcatcccagcaatttgggaggctgaggcaagaggatcacttgaggccaggagttcaagaccacctgggcaacatagagagatactgcctgtacgaaagtttaaaaatcagctgggcatgctggtatgcatcccagctactcaggagcctgaggtgtgagtatcactcggggccagaagtttgaggctacagtgagccatgatctcatcactgcactccagcctgtgtgacagggcaataccctatatcaaaaaaaaaaaaaaaaaaaaaaaaaaaaggaaagaaggaaggaaggaaggaagataatttctttggtttgtataggacctacggagttaaagcgaagtgataaaataaaggaggagtccttaatgtgcaaagatgcactactcatatatttgaggataatcttacatcaatacttttaataatgaaagaaatgtgaaaatatgcttgccactggttttaacatttaccatcatccatgtttgaaaaataaaacccaacactggttcctctcatgagtatttaattgttcaagaaaaatcctagaatgagtgagttttttctgtcagtaccaccttacactctctacccccattccatctttttatatagtctcttcctggcacattgataattcattccatcagaaaatccccactaaaagtaattcatccatatgtattcttccactgaaattaacaggtcccagccagccccatcccctacctagtcaaccaaaaaaagaactcttacgccctctctctgattgattaacccactttgacagtgagaaatgcattttacattgagaagtaagtagtctcattgatgcataaacgactcatgtactcccagagatacttgtcttttaaaaggaagcgcttgctaactgaactgaaaatgctaattaattgaatttcaggaagcaggaaaataatttttttagcagagaagactttcttcatatatagggctgctacatttggaaactaaacatacaaactgtccagttatatttgactttcagataaacaatgaataatgtttactagcagtgggccccaaatatagacaatgagaacacatggacacagggaagggaatatcacacactggggcctatcgaggggtgggggcctaggggagggataggagaaatactcaatgtagatgacaggttgatgggtgcagcaaaccaccaaggcacgtgtatacctatgtaacaaacctgcaagttctgcacgtgtatcccagaacttaaagtatagtaaatataaaacaaattgtatgaggtatgcttatgctttaagaaatcagttatctgaaattcaaatttaactgtgtggcatgtattttttctggcaaccctgttcagatatcttaaatcattatggtggttactcatatcctccatgtcataatgctgaccttgggtctccctacttccaatctgccagtccagcccctttggacatcactgtttcctttacgcaacactctacctagagaacaacaacagttgtcgcaacaaatcaagtactcttctaggccaacttggtaacattctaaaacaataatgccctacctagcccacgggctttgggactttactgggggtgaatgtagggtagcaggtgagatatatttgggaatttaaacaaaagaaaatataatttgagcataggctttagctgactgtaataatagtatttaaattatttataaggttttaacaaagcatataattgaacaatttcagctgccacctgctattgaggataacaaaaaggaaaattttctcagcacttaagaaatgttagaaaacatattgatatgaaagagtagaaatgaatccaaaaaagcatgcatttttttctttagcaatttttgttttaactatatctttttccagttcttcatcattgacacctgaaaataggcattggcaccacaaaaatggttagatggagagaatgcaggacatgcattgaactttatattccattgtcttacatgtttatcaacattcactttgatgtaccaaaactatctttaaatgagatgcacattttaatgtacatctagattagagaaaaatcactctggtctgataactttatgggattgtgaatacaagtgatgtgatgggtggttgaccaattattttaaaaatggtttagtgacaattcaagattgtgttgtagctcatacccttacacacacacacacacacacacacacacaaacacacagattgtgggattgacagagatgttcagttttcaaagtcaatgtttcagtgttcaacctccattttcttctactctgggacttaaaaaaatgaatctgttaaaatcaggaatacctaaatttccaagtaaagatccaagaagactaaagcctaaagtctatttcataaaggagcttctaaaatcaatttggttactttgcaggattctcaatattattattctctatttgccaacttcatagtctccacatctctaaccagtgccttgcacattgtctatattcaataaatattaaagaaatgaacaaaattgactgtatagaccatgtttcttagtccatttagtattgctataaaagaatatctgaggctgggtaatttttttttttaaaaagaggtttacttgacttatggttcttcagactgtacaagaagcatggcaccagaatcagcttctattgagggcctcaggtgacttcccctcatgacagaaggcaagggcagcctgtgtggggtagagaccacatggccagagaggaaacaagagacagggtggggtgccaggctttttttctgagatggagttttgctcttgttgcccaggctagagtgcaatggcatgctcttggctcaccgcaacctctccctcccagcttcccaggttcaagcgattctcctgcctcatcctcccaagtagctgggattataggcatgcaccaccatgcccagctaattttgtgtttttagtagagacagggtttctccacgttggttagcctggtctcaaactcccaacctcaggtgatccacccacctcagcctcccaaagtcctgggattacaggtgtgagccaccgtgccaggctgctctttttttttttttttcaaccagttctcatgagaactaacagagcaaggactcactcgttacagtgagaatgaggcaaaaaccattcatgagggatccacccatgacccaaacacttcccattaggccccacctccaacattaggaatcaaatttcaacatgagatttgatggcgacaaaccatatccaaagtatagcaccaagtatcatacacctagacagaaatagacttggctcaatgtcacatctgctgtgacagatgtgctggacatctggtagtgtccactctatacaaatctgtgataatcatcagctgctgagctctcaaacaagacgaaactgtataataatccctagagggtctctttaacccagaccagtataccacaaaaggaatatagtgagaatgactgaattcacatgacagactgaaagcaaacttaagtagacgtttatatgattatcacctgaagaatgatgaggttcataaatttggaaaggagagctttatttcttataaagggctgcagcctgcagagtgaccttctgacaggttgggaagcataacttccagccagaagccagaaacagacacttcaagggagggaaaaaggaaacagaaatttatgctaagcacggtggccaaatatatatgttcaataagttataggaggagtcatgaatatttatgagaggagaagcatgcacatcctcaactgagcttcatgcccctttgtgggatccatgtggaaaaaatggcgacattagcatgatccgagggtagagttttcggccctctgacattaaaaggtgaagcagaggacacaaaaatccttactgcacattctcagtggaatggctagaatcattccctagtgggtggtctcttatgaggcaccaatggagggaaagtgtcaggtggttggtccatgtcagtgggggagtcttttgaaagggctgatttctgtttagcccttagggaagaaagcctcatagtggttagtgagggaggggttataaggaggtatgtctgactccctgatccaccatggctgagaattcagtcttcaaggttactctgggatccttttggccaggagaaggtcaattcagtcagggggcttagaattttattttcagtttacatgataaattaagcataattttatatcataaatgataaataacatacagaaaatttaatatactgagtttctgaatcaggaaattatctctgcctttcatctttcaagacctattttctgtaagttctttcagctttctctataccaaaatggttcttctctgaacaataatccatagtaaccattgcagataatatgcctttgcttagacttgttctatgtctagattttatatatacagaatctgaaccaaatgaattctgcagctctgatacttctagtctcaatttttcataactcagggaggttccatttgtcttcaggttatttggaaaagtgaaagtgtcaaacacctgatactcattccccagggtagttaatttgtgctcaacactctcctctccccgttcctggatctgtttctctttcccctgcagtttttctctgcttcagccccgctgcccgtgggttctatgctgtatctctccatacagcaactatgcctggacagttttgctttgtgttgaggtggtttcataagaatgcttttgagcagaagagtatttttaaattgagtttatgctaaagagaaacccctctgagcagaattccacacagaattctgcaggatatttcctgcataacaccataaacatccttctggctgcagcagctcaagtatttctgttgaaccatttcacaccctgagctaactaacattcagagaatgaaaggtgaaagtcttaaaacataaattaaataactatgatttcttaataacactaatgactaaacattccacatagatcctaccaaaggagggtattgtatgtctcccaggaacagagtctaatcataccattgttgtgctggaacaccattgagtccaatagggatggcatcatggccaagagactaaagaagagacttgaagccagcaagggagacataggatttatctaggactcatatacaggggtggtccagtggcagtgggctggatgggagaaccactaatgtttgtaaaaagcatgcagtttatatagcattttcacttagcactctccacctagcaacattcatttaatccaaacaaagggcttcatccactgtatggcccacattctgaggaatggaccaggctttggaaatccttaataataaggagcaaatttccaggttggccacttccagccagatttcttacctcagacttccaaacacacattctttttagaccacagagtcattctcagggtacccttaaattattgctgtcaggtgcgtctgccatacaaccatgagtcctgaaaggatttgcacactgaaaacactgcattattttaccaaaatggttatcaaagtagatatttccaaagaaggaatgtaagcatccttcctcccaacccccaaccagcattttgtgttaaaatgctagtgttggcatctttttccttcaaagggaattgtaccaagcctgattttttctcccattattgccccacagcaataaaaagacaattgctgactcaggcactatttcctctggctgctacttatagctacataactcctggctttaccagcaccataggcaaaaatgacctgcattgtctgagagagcagcaagaagaatggcattcattctgtctccatctttgtgggtttacattaagttacttctagaccatggtttttgaatgaaatagaatggacttgaagtgtctacaaaggagaggcacagtccagagtgggaaggggtggggagaggacagcaacggaagtgagatggaggctgagcaaaaaaaaaaaaaaaaagaaaattgagaataaaggagagctgggagagaaaagatgaacatcgagaaaggggaagatgaatagactggccattaggctttctcttcgagtaatccactttgtgcaaaacctgccatatacaacttggatataggcagtgcctctctcattgctagctaaacagccctgggaggcccacactgggctttaagtgcctatcacctcacacttggtatctcaaaatctgcaaccacaatcacagtcacgaggattagacttcactctctacatcctcccaaatctctgtcgagtgaccactcacccacacaataagattacttattttctaacaggaaaactttactaaaagaggttaacttaaataatttacttacaatgacagtcattactatattcttgatataaactaatgacatttgttcaaaggaattcccttaaattattctgactatgatcgtctagaagagatcctaaatttcacatgatttattatgtgaactatccatggtcttactctttaatgacaatcttctctgtaaggaaaaaaatgaaattaatcatcctaatgatactgatgtgtttcatgagaaaactacaggcagagcctaataaactatggcagatctgaatctcaggcaaaaactatgtactgtatttctatgtattgtatgtagattgaatgaattttttgcctgagatctgaatctcaggcaaaaactatgtattgtatttctatgtattgtatgtagattgaatgaattttttacttcttagtttattattagggtgtcttgaaaaacacccctggagtatacaaatgtagatacagacatatgttagatatctgaccttattttaactgcagtttgcataaggcatgaaaaactaagggtagataatgaagttatttttaaatgtaaaagttttaaacatatggctgaaatatgttgttttagttaaccccaacctactaaaaattggcttattgagaaatcaaatgaaatatttttgtaattataattacaccaaatcaaattatttctagaaaagaaatttataaaacaatactttctaggtttgggatttctatgtaaaaaccaatttctttcttggctgctaaaaaatagttatgtgagatcacaacagtaagaataacattttacctagttatttttattattattggcagtaacattcttttgtaaagtaggtggcaagaacactacaaaacgaactgaaacacttcacaaattgtcgtgcccagatggtttatgtccccagaatagtaatagctctttacaaggagatggcaagcattttggcagaagtctttttggtttctcttcagtatggatattaaactactttatagacagaattgaagatatataatttttctccacatcagattatatattataaggtggtgaagatatataaatgttgcacaactatattgaactttggagttacagataaattatataaagtcatctgctcagttagtaactagaaataatccagtttagcaatacataaaacataacggaagtaaaacataaattgacggtggaggtatagttcagcaggattaaaacctgcatcatatgattctaaacttgaatattacaatcatctttttaaattttggagtctcccatttttcaaaattttgaagtctccatttttgccagaatgctttatttactgtatttgttttgggtctgtccaagtaatataaattccttggagagacctagatcaattagagtagataaatactattttaacacagctacttatattttcatatattttatttagctttaaaagaatatttcataactattaggacctggcagacactggtttgggagttagaaaataaaagttctgatttaagtcccaccattaataagctgcgtaacctgggacaaatgacatatttattttgaaagtaggaagcacataagttctaaacaaagaaattgcccatttttctttgattcagtttgttttctattaaatgagaggaatagactaatctctgttttttaaatctttgccatttattggttttgatttacttatctttgtctaattctcttaaaataacttactcaacctttcagaagtccagaggtcaaggtaaactaggtcttgtctgcctgaaagcctgtattatagactaacactgttccacatcaacaacaaaatactatcacattaagtactatatatattcttgtctgtgaataaaccataagagctgcactttatattcagttcactaatcaattggttagtaatttttttccctgtaaatcacttctagggtcagataaggcaaaaaaataatagcaattattctaatagatcataacaatagcattggaaactgggaggagaaaatgagagaattgtctcaccaggttgtagggagagacgggggagtgaggagggggaatttcttttaggctttaaaaacaacatagaatttaaggacattattgaaccaaaaaatctcaagacattaccttagttatggtatttcttgcataaatacacaatggcatcagagtgtgaagttgtggatgctgggtgtctctcggggatgggaaacactaaatttcattcatctttctcaggttctgaacaaagaaaaaatattcagaggactaagacagatatcacctttttatctcacagaagtttgtggagagtatagctttgtgtgaaagcccaaaagcccgttaaccaaacagatctaaccacagaggcccaagcagtcacacagagctgccctccaaaggaagaaactacataatgatttacttataaaaggccagtttcttcgggtacaaagcatttataaggttgcctttacagttaagacttctgtgtgaaatgccacagggaaaatgaaatacttcattgtgagctatcgtacatatttgtttgactggagaaaagcagatgcccaagggagtttaactgtaaggcttcatgggttaggattactttaaataaagctcctccatctgcactttgagggtcaccaaagccatatggtttaccactcccagtcacctcaagtataaacatcttttggctgtgataaatgcctcctcaagtccagaacgtaatacatgtgtcctcttctacgggaaacagagatatataatgcccagaagcaaaaacctcatctagtactagaacatttatgataagtaatgaattagtaaagtcttagaaatgacactgaatattatcagtattaactttctgatcttgtaaagtctcccgagaaggtaatctgttaattataatgctacagatttacctccctctttttctttcagttagatattaccagatgatattatatctttatttattatttgtatattctaacaaatttttccttataattcttttgtccacgttatttgatattggtcatgttattgctattactttactatttctttccactcaaaatttccacttcattttcttacaatcttttttttcccccatgatctctcacttccatttcatgttcttttggattatttttttcctgtcttctttaggattgcttatctaattgaattccacttttaatgtatttttcttgtcttccaaagaatcattcttcttccagttttctattgcccactactctacttatttccaatattttttaaaattccttcagatttgaagtttgctaacatgcactttgttactttttcttcctagctatggtttcttagttctcttcttaattttattttgtccaaatgcataaccataatcatcttgaaaaggcctctctctttgaagtcttctcttgttaggaaagtttcattgtcttacctcttttgaaaggagcaaggtctcctctatgtaaccaaatatttaaatgctggtttttatgaaaagagaaagctgtaagccaaaactgcagattctatgaggttactaccccgtatctagtgacatgtattttcataaattaggacaattaagtcttctgttataaatttttagaataaagaggtgaaatctcctttgtaagtgtaaatggaaaattcatgatttatttctgtattttaatagaataagtacagatttcaaatgtaatttagaacaatttttcatattactaaaaaatattaatattgaatgacatctgacagttttttaggtatttcataattaaccttatgagatttttaatgagttttattcttataattaatataacataatttatttttaggtagcatttgaatagaagatctacttagagttaaaaaaatactttttctagtatcagtatgatttcattataatatgggttatattgcttacatatgaatataattcctgtatctaactaatttataattatatataatacgtttgaactgatcatatttgtcagtgtagaattcatgtcttctactttcttggttgtttatttctccagtaaatgatagctagtgaccagggagattttctttagagagcttttctcaaatgcagtatttctggagaataggaaggcttttagtaactgtttctgtccattcacacaacttcatggacaataacatcaagtgtggcactctgaaagacggtgattgtcgtaatgatcacatatgttaaaatatacctatatatgatatctaaacatatacatattaaggaaagtgctaaaacagtaaaatgaaaaggatgaaaccgaattgatggaaaaagacatactagataagtgcaaataagtagaaattaaagtcattatatgctatgagacaaagttgtctttaaagggaagaaactacagtaagataaacaagggccatttaaggaagtacagggttcaattcactccaaagatctgatcataagtgttatctacacatcaaacaataccgcattggaattcatagaacaaaaatgacagaaaccacaataaataaaaacacattaaatagacattaatttgcctctcccaacttggaacagtcaagtagaaaaaaaatatgtacagacatagaaggtctacataagataagaaataagatcaatataattgaggcataatgaactctactgctttaaaataaagaataagtttctttttaatgttcttagaaaagtcattttaaaaacaacctctattaggataaaaataaatcacaataaattccaagaaacagaaatggtacgaactacattatcagagcatagggtaataaaactaaacataaatttaaaacttagaaggaaaatctatcatttgaaaaatttaaacactttcttttaaatagttcttgcatcagtgaggactttgaaaccaaaattcattttaagaattttctggttattcttgtttgcttatttttccacatgaagtctcaaatagatttctctagttatatgaattttgtgattatttttcaaaggctgcatttaatttattaatttagggaaaattaatatctttatgatatagcattcctatctaataataggatataactttccatccatttatatttacttttggtttattcaaagcttttaaaaaatgcttacattgtatttagaaacatttcttccattgtactttttctctttgaaatagactagttttacagtagttttagattcacagcaaaattaagccaaaaatatagagtttcccctttctctacacacgcagagcctcccccaactatcaatatctcgcaccagagtagcacatatgtattactgtaaaaataatctatttagaagagaaaaaatacaatggaagaaaattaatttaggaaaaaaattaattttttccctaaattaacaaattaaacgcagttcaaatatacctgtattgtatataggtatattttaacatatgtgctatattatatgtattagaatcaaagtcctctttgattcaagagctattttagagacagtgtttaggtattgtatatagttacaactgatgaacccaatttgatatatcataatcacccaaagtccatagtttacattataattcaatcttggtattgtacattctatgggtttgcacaaatgtataatgacatgtgtccactattacagtgtcatgcaaagtattttcactgccctggcaatcactgatctttttattgtctctgtagttttgtcttttccataatgtcatatagttggaatcatactgtatgtccattttagattgcttctttcaattagtaatatgtatttaaagtttctccatgtcttttcatggcttgatagctcatttcctttaatgctgagtaatattccattgtctggatgtaccacaggttatttatccattcacctactgaaggacatcttggttgcttccaggtttgggcaattatgaataaggctgctgtatacatccgtgtgcaggattttgtgtggacataagttttcaactcctttggttaaatcctaaggtatgcaattgctggatcatatggtaagagtatgtttggtttttaagaaactgctaaactgtcttccaagttgctgtaccattttgcttgcccaccagcaatgaatgtgagcttctattgctccatatcctcatcagcatttaatgttgttagtgttctggacttcgaccattctaatgagggtgtagtgctatcttattgttttaatttgcatttcactaatgacatatgatggatgtggggcatcttcttctcatatgcttatttgccatctgtgtgtcttctttggtgaagtgtctgttcaggtctttggcccattttttattcagattgttcattttcttattgttgagctttaataattttttgcatgtttggggtaacagtcctttatcagacatgtcttttgcaaatatttttcttagtatgtggcttgccttcctattctcttgatagtatctttcacagagcaaaatttttcattttaatgatatcagattgtcaattcttttttttcatggatcgtgcctttggtgttatatctaaaaagtcatcacctgagttctggttccaaaatggcagtgaagaagcaagctggcacaattcctcctcaccatcactcctagaaaaccaaaaacaaatatatagcactgagaatatcaccagaaatattccagaactcaaatatgaagatgagacagttccaagaaaaacagagaactaaaaagttatcaacaaatttagtcaactaggttttctccaatattatcttctagtagttttttagttctgcattttacatttagatttgtgatccattttgaattattttttgtgaaaggcataaggtctaggttcattttttttttttgcatttggatgtctagttattccagcaatacatgttgaaaagactatcttttcttcattttattaccttgcttctttattacagatcagttggctgtaattatgtgggccttcttccacactcactatcctattccattgatccacttatctattcttttgtcagtaccacactgtattgattactgcagctttacagtaagtcttaaagttgggttagtgtcagtcctccaactttgttcttcttcaacattgtgttggctcttttgggttttttgcctttccaaataaacttcaaaatcagtttatcaatatccacaaataactgctgggattttgacagaaattaaattaaacctttagttcaagttgggaagaactagtgtctttgatatattgaacactcctattcaaagacatggactgtctctgcatttatttagttgttctttgatctctacctcactccatatagaaaataaattccaaatagataaaatatttaaacttataacattaaaccaccaaaatactaaaaatacaagagggaaaggtgatacagatgcatgtgtgtgtatgtatatattttatatcctttttcctaccccttactgcccatctctctggatgcctttctaagcattatacagtatccagaagccaaagaagaattagataatcacctaacaattttaacatttttaattaaatcttttaaaatctgtagcacaaagcaccataaagtcaaaaaatatacatttttaaaagaccacacatcaaaaaatcaagtggctaatattttgtcttaaaagatgctatagattgaaaaaaatagaaggaaaaaatgggctgtttttaaataagcagttgcaggaaagaaaataaaaaataattcttaagtataagaaaaatatattccacttttctcatagtaagacaaatgcaaattaaaattataatatgctctcatctttgtccctgtcagattggaaatatcaaaaatatgataacatattatattggtgaggataaataggcactctgttacattgctgtcaggagaataagttcatacaaactccatagaaagtagttttgcagtaactatcataaataaacattctgtacaaagccaagtctacctttaaaaattaattttataaatatatccacatatatttgaaagtatgtgtgtaaaaatgtattacttgcaactttattcaatattagctaaagattggaaacaacccaaatactcacattcagggaattggttaaataaattatggcacataacatgcaatggaaacccatgtagccagtaataggtacgagtcaaatctataaaaattaagataaatgaactctaatatacattttaagtaaaaaatgctggtgtaaaacagtttgtataataagattccatttgaatatgtattttaaaatagaatatgtatacatacactcatgttctagcatatacctattgaatacctggaaatatatatgggagataagtagtagtagttgcctctaggaaggggaactgggcctggggaaacaaggtaaaaaggagatattatactgcattttcttttagatatttgcatttatatcatttacatatattttctatcaaaaagctatttaaaaataaaaactatatatatacatcagaatattttatttcccttttgagaaaagttactatatttgttatccctaaacttttatttgcaaaaaataaatgttagtattttcctgatgccttgtaggggaaccagagtttgtagacagaacattcagttttcattgatttacagacaacctattcttgcaggtactaaataactgcaggttaagttctaagaaccgctgaaaacttcacttagtagactaagggtacaaatttaaacttgagtcctcccttcttttgatcatccactctgaaaaatatggttataaacctcacaacaatgagaacctccttgaaatttgaggtctctgtccctcacaaaataattatgcctgcaattttcttattgtagttcatatacaccaaagctataattaactgtaccatagcttgctgaccttaatgagttaatgcagtctccaaataaaattcatggccaagtggcagcttaggctctggaatattttggctcagtaatatctgtgaaatctgagctcatattaaatatgccttaaaacaatacatttgggatttggcgtctggcatcagatcaggtctgactctgctgtatggggttgacggttttgcctcaggccttcataatatggttagcactataggactatagaatcagcaagaatttcattattgcttcagtgaagaaaaacacttagtttctattgagtttatggcaccctgacttctttctgatcatttttcttgaaacaggagactcctgctgtctcctgcacctacagctatcttcttccacccccacctccatctagcaatttctttacagcctagttttcctctccttcttactcacataaatgacatttgtccaaccgtggactgtctttatctttatgtgttcaagtaagccaaccatgcatggctagtgaagtgagcaggacatagttccagttgtctcaaatcttagaagaggttaaagcccagtcaagacagcaataactatttgattggtcattaaggttggtcactgcaaactatcctgactatcttggccaggaatcacttgtcagacctagagggttagattttatgtcctctcagagacaattccttttcccctcatccttgttaaatgagctatcctttgcctttatacgcacagtctccatcttctgggtgtgtcacagactgaataactcattagtgatatagtgttaattagcctaatgtactttgattaaggccatatttgaaccacttttaaaactcatggcacagttcctgtatcagtaaagcacaagaattaataaataagtgatgcttaactaaactcaacacagaaaccatttgtgttaaaattttttctttagaaatcacctttcaatttaaggagaaaacagactttaaatcctctagctcatgtttcatgacaagaatttatttatattaacatctcttagtccactctttaaaatatctgtattccttttattttaggaatttcatatgcagaataaatggtaattaaaatgtgcaggatgacaagatggagcaaacagtgcttgtaccaccaggacctgacagcttcaacttcttcaccagagaatctcttgcggctattgaaagacgcattgcagaagaaaaggcaaagaatcccaaaccagacaaaaaagatgacgacgaaaatggcccaaagccaaatagtgacttggaagctggaaagaaccttccatttatttatggagacattcctccagagatggtgtcagagcccctggaggacctggacccctactatatcaataagaaagtgagtgttttttatcaggcatattttgctgctaattgcctactgcattccttggactgttgtagcaccaacacatgccaaattagcacaaaatcttaagtatccttctgtttaagaaatgaaacacatttgtgggtggtttatgcatatacatgagaaatgaattgattatatcataacatatgcaactgtcccaaatgcaccatgacaaataaaaagaggccaggtgcggtggctcaagcctgtaatcccagcactttgaggggccgaggcaggcagatcacgaggttaagagattgagaccatcctggccaacatggtgaaaccccttctctgctaaaatacaaaaaatttgctgggcgtggtggcacacgcatgtagtcccagtcactcaggaggctgaggcaggggaatcccttgttgaaccctggaggccgaggttgcagtgagccgagatgacgccactacactccagcctggagacagagcaagactgtgtcaaaaaaaaaaaaaaaaaaaagaaagaagagagggtgggagggaaggaaggaaggaaggaaggaaggaaagaaagaggcagctaatttaacaaattgacagattctctccacagattcgatttactatacaatttttttgtactttctgtacttggaaatacttggaaatctcaaaatcatgagttataaagactatacaaaatattagtactaatttttcatgcaaacaaatttgatgccacaagggtttgcaatttcaatgtcatgttataaacaacaaatcaattaatttcctgaagaaattttgttacctgtaaaataacatttttacataaactagaattttacaagttatttaatattttggtattaatgtactaatattggcaagaattaacaaaaatgtcataacctgaagaacctataaacaatatttgaatgcgtgcttttttcatatccatgcttgaaatgaatcttatgttaagcatccaaccgttcattatgactgtcatttcaccaaaccaaaacaaaaagcataaaattttttttaagattattgcattgattttaaattaaatgtatgacgttaggtgattcgtaacattttcttctttatcacttgacacaatgcatttgtgaatcttagtggaaaggtagggcacaaagattgtaattaagtaaatttttttgttggacctggaccttaaaataccccctaaacttttagggactctgtttctggcccagttctgtgtgaagttagtccttgccaaatgcatgcaaaagtttggcatttgtaatatgtgaatttgaggcagttttataaatcacttccgattgacagctacagtttcggaggaaagagcgtcacaaaaggttgactagccttaggttcagatttttttttaacttttcaggatatagtcagtttaagtataacatattttcccttttttttttttctttttgagacgcagtctcgctctgtggcccagactggagtgcagtggtgccatctcggctcactgcaagccccacctctcgggttcacgccattctcctgcctcagtctccccagtagctgggactacaggcgcctgccaccacgcccggctaattttctgtaattttagtagagacggggtttcaccatgttagccaggatggactcgatctcctgacctcgtgatccaccggcctcggcctcccaaagtgctaggattacaggcgtgagccactgcgcccggccagtattttcctttttttttttttttaaacattatacaactttaatgttacaccatctacaaatctaaattacatttaaaattatcagttgacagtggtactaggatttactttaggaatcactacatatttcccctttttaaaaactgatctattcattttacagtagaggaagggatggatcattttccatgtatttcattttcctctaactttgcttttgaacaccatattgtcaaatcttagttgataagagattattaatctcataactgccatttaagttatgagaaaagttgcactttattatttaatcaactctttggaaattaatgtatctgaaaagccaaagcccaaactaaacaaactacaaggactttatttgtataagaaaagtaaaaatgcagataatccaattgcctaaacattttaattcgtttaaaatgacttcggtattgaagtgaagactgatgtgttccaggcagaaattcattcacagtatagagtatgctactgtatttatagccattggatacttttagtttattcagaggctgctcttgggatatgttagtgggctccatcctcaacaggccttttgctacccccagacaccgggtcctcacctctttggtagcaatcaccatctaaaaattattaaagccacccagcatctatcccttaatcaaacagggaagaaatttagtatctctgctcctatgctgggtccttatttgtaaaataataaatgaatgttttgagaaagaccaaactaatgcatgttgacaaaggtagacattcttcatctggaaaccagaacaaccaatcaatcttttttttctttaattaaagagctttcagactgataaaagtgattgtctcgaggggatgtccctaaacaaaatggtccataattggtttataatgaattatatatagcaaaggatataaagacagatgtaaaacaaaattgtgcaaacattttcaaaatactcaaaagaaacatcttaaaactgagggtgaaaggccaactctgatgaagtgacagccagattcttgtgtcgaggaaacccttataaactttgttaggctcacgtctaaacttgctcttaacatcttctgttcttatcttcaaatgcacatggtatgaggaaagaaaagcattttggcattttggagcaaatcacagtgtgcaagtagaacaacctgataagggaaatattgttatcaggaaagagttttccccaaggtaaggtatactcatggcttttacattgaactgacagcaagcaaatcttcaaatgtaagtcattcaacagcaatgcacacgaagctttttgcagggctgaaatccttaaaaactaacatggtgtgcttagaacacatgattgagttatgtgtttgaaatttccttcttctgcatttttatgtcttaagacttttataagttgcctgtacacttttttctgcctttaattttcttttctaattggattatttcagtattgaaaaatatccttaaatggaattaatttgctctgactaaagttggaatgcttagcaaaatctgaaccttttaaaaataatgaatatttctttcaatattcgatgactaattttactttagtgactgggttatctgagattggctgggtgatcttcattaaaacaatgcggtacacatacacagtactcttgacacagctaaatggtcaaacagtggaaatgtcaccagggaaaatgtttattaggacgagattttccactaatgctgatactgggggtgtggattagatttgcctgagtgaaatggaatatgcagttagactagtgatttccctaaagttggactctagtacaatagttaatgtgtcatttgcatcagtatacaaagactctggtttctttctcaactatatggaatagacaaaacaagccaattgtaaaaatatttgcagaatccattccttatgttatattttatgttaaagtgcagtagtgtacatgcaaggaatttatgtgaatagaaaaaacacaaccaccacactgaagctctctgtaatcttttacaaaggcagtgtcagtgagcttattaaaatgtcactgctgagagtatattttccaatggcatatgcccacatatttttatcctctttgtcccagtttaagatgtgcaaattatgtaatgttcaaatattctactaaaattgttaaagcagtttaatccatgttcagtaatattgtagtagtaactaaagaaatagtagcatctatgcatcatgaacattcctgatgcatagaagcattagaaggtttttagatcctcagatgttttaagccttcagagttccaggttaaaaactcaggggaaaaaaatgctatcataatatggtgacagtatttttcatatcatgttagctctgactcagtggtctttagaacatgattccagattggtttccctttgtttgtttatttactttagctgtgtagcaaggcacattttagcttgtgaacacacctttttttccctcacgggactttttttcacagtttcctttcatagcttgggctgattttgtaccatttggccctacattcaaattctttacccactctttattacagaaaatgtcttccttctcatgttcttgttaaaattacagacgaatcattattaccatggaagaaaatatcattttaacaatgtgacagtttactggaaatagaatgagacattttagatctgtagtaaaaatggatgtttgttaattatggagtgcagaaatgcattcatttttaaaaagtcctatggatcatttaaaagtaacttattctctcttgctatcaactgtcctgaaaagatgcacactccctttttcttgggctccatgagaagtcatatatgaatttgtgatttcaaattcatgtttggtctatcactgccaaaggagtttttagttgttaaattgggtggagagagtttgttttgtttttaattggaattatggagtttttcttgcaaaagtaattaacgggaaatcagaaaagaggatgattattaaaagcttataatttcacgaattgtcatatgggcagtccccagtgtgtagctgttctttgcttatcatcagctcctgtaaaactaaaagtcacccagactctcccttacatccaggaccctgtagttgacttcccaatctttctcttccctatgcactatttcttccttgtgcttctttttcctttgtcacctccctgtctctgtctcagaaacagtcccaagatggtgatgttgatcaataaaatgatgcttggcatttttagagtatctgccatatctataggagatccttcaactgaaagtttccaaaacccaacagaaacaacttttggggaaaaataaaggaaatgtgtctagtgaatctggttttaatatcaaaatacccagtacctcaaacaatgtcatgagggtactccttttccatggtcagctctgctgtcacccatgctggcttcatttgcaggctggctcttccacaagatggcagaaatagccaccagtggtgctaaactaacatcctacagccttgtaactactatcttctgctaaaacaagaaagaagaaagaaaaaaggcccaggtttccttcaaaagctctagcagttgtcctagaattgagtctaattaggtcacatggcctcctctgaaccactcactttggctagtggtatgtgatggtctccttggtatgggatggtctctgtcatatactaacctgtgttgccaaggggtgggtcagctccaccaagccacatgggaagacagtggggcagagatttactccaaaaggaagagaagaggaactgttagaaaaggtgtcctaagcaggcaaaaaaaaaaaaaaaagctatgtactctacatgctatatataatatcagtataattactgttcttttttaatccacagattctttcaagatagctcttgtctttatttaaaaataataaaactgagtttaaataacttgcctaagactagttttaaaactagaccagtgagtttccatggcccattgccatgttagtttggatttgcagtcatagcactaatcacagcagtggaaaaaaaaaaaagagaagtcagtgatggaatctaaataagcctatagctgtccttcctgtttcctactcatgccattttgcaagatgtgattctggtctcccaggccggcagtatttcccgaacccttactggtcatttcaacacttggccatttcctgcctttgtaaaaccttatttatttattattattattcatttttatcaacatcaccatcttgggactgtttctgagacagagacagggaggtgacaaaggaaaaactaaaatcttagacactcagtgatctagattagcttctaaaataattagaaattttttttcccactaaattccagtagggtgataagcacctattttcaaagaggatcaattcaggaaatttaaattgtgtgcctctataaggaaatggcatttaaattgggatctgaaggttaaaaaggaggagggagaggagaatcttccaaggaaagagaacagcatagaataagacatataatcaagctgacctgtaataggtaagaagagaataaggtgaggttggggaggtagacctggggctagataaaggggatctttcagtacatcttaaagagtttgaaggttatcttcaaagcaaaatgaattcccaacaagtatttaggtacagcagtaacatggtccactttacattgttaaaaatcactcaacttctctatggagaaatttaggagttttatacttgatctagcattttgacaatggagatggagaataatggatagagtcagaattggttttggaggtgtttaggtgtcagacagaaggaagctgatggcctcattttcttagataggaagtttgagaagaaagatactgaacctgaaaattccaatactaaaattggccatgctttggagaaacagaaatgttcttatatgtgtatatttaagagttagaatacagagacgcattttaaatattttaatccttatatttttattgacactttagaattcactaagggcattgacatgttttatttcactttatcctcaaaataatcctaagattggtattagtataatcttctccattgagatggagaaattgaggggaatagtttgctcatagttctcacacagcaagcttgtaatcaagctgggctcaaaagtgttctttccagtcaaagaaaaattaactgaccatataatagtgtagcagacccatggtatgtacattctgatgatatagggctgaaaaatgtttcagctccagattttattctttttccttgttgttataatttcttctctctgctggagaagaggttgagggctctgcagccttggctgacaaaagcctacctaggcactttctagggaggcaccttctgcagagttatctcctccactggccccaaccctccacccagctaaagcataggaacaagcaattttacagactcttctctaggtacaaattcttctcttttgtgtgagcatatggcaacaatgtttaaaaactgactgtgaggcatggagtccacagacatgttttgttaaactaacaaaattatttataattttgaattattttctggcatttataaatcagaaaatctttcacacactcataaaattatacatctaaggattcctcttgaaatatgagttcaggcatcactgacttatatgcctaaaactggcaggtacctattgtcacttagcctctgtgggcattttagtttgtaatctgtggcttaaggaccacatctgtcattaagtgaaggctatatattaaagcttggtggcccacgggtaggcaagtgacacagattgttgtttagtctggttatcactggttggaaggaaaaaattgaatgagactaggagatgaaaaaatattaaatatggcatactctcttcagagtcaggtagaaagcctgcaagaaaacttttcatcccccagtgagccagaaaaggaagaaaagcttggcttgaactcacaggctatgacaaatgagaagggaagtaggtgagaccatttaaagtccttggggaaaaaatattatataccatggaattgacccagcataagaaatgtccccagagatatgtattatactaatggaatctcctgaccatctatgctgctcttcacacccaaaactttgaagcatctctcctcttgcaacatggctctaattctcccccttcatgctggaacctctttccaagccagcagcttagagctatgaaaaacttaatagcacttctgggtaggagctagagccagataattttcctggtctgacttccaggctatttcaaggacagaactctgccattttcagagtaacactttcttacacatagtgataaagtttctcagtgccattcattcagaattgtacttcattaacagtttgatagacctgtgggtctagaaatatatgtgtatctgtgagaatatatgttcacatttccaaacaattgacttccaaatgcatttctggagcacagctcatgtacaagttggaaattgcctgtttcaaactttgaagctaaaggataaatttaaccaaccagtagtatattctacattttgtgtattgttcatcatcatagctcaccttcctgtgttatttcttgtttttgccagtagatttactttaagagtaggaaagtgcaataaatttggagtcagtcctgttatttggcaatgtttcaataatgtttagatgaaacacaaagttacagcttatgtttaaactatgtactttgaagaatatggcccctagattgaaataaatgttaaggtaatggctatatttaaatgagaaaaagaaactggaaaaccatggcttgttaaattcaatgtccatcctgggaaaaaattgtaaacaaatcactttctataagcccagaaacaagaaaagattactagataataacaaatatagcttcataaatagcaatttctaccaaatcattataacataattattttcttagtaactattcagttagatcaaggggcaagatttcaatccacatgtacaacataatcattgataatttggccaatggtttgtgattttttacaaccattaggtaacaaacatattaacagccctgctatgacagaatcatctggattacttatttaaagtataaaaactaggtatcaaaatctgaccagctaaattggaatcacattacctctatgagctaagtacatttattctgttttcaagtgagataactgagtcacagaaagttaagaaacctgttccggatcacactgctggaaggcagcaaagttagcttttgaatcagaaatctaatttcagagtttgcacccttaacataagataaaacaaatcatacttatattttcataatgttgcttcccagattattaaactgttaattaccagggttattaccaatttttctatataacttccttcttgctttttctttaaaaccagaaatgatttttacatggcaaggattgctgaagaaggtatgagcttgctgaacaatggatggtttaagtttaggtctgtgctgcccaatatagcagagattaattagccttgtgtagctattgagtatttgaaatatgtaagtgtaactccatatttcaaagatctaagacttagtataaaaatatacatatctcaaaaattttttatatcaatttcattcccaaatgataataattcagatatgttgggttaaagaaaatactgttaaaattaatttcacctgctttgtttttcttttaatgtggctctcaggaaatttaaaatcataactgtagctcagatttgtagcttacattatatttctgttggaaagtgctggtcaaggtaaccttcatcaattcttctatattctattaaaacaaatagttgagcatctcctagtttataaatgtcttggtgtcataacctatgtatctttgttttctctttagaatgtagcacagggcattgcaaatattgtactaaacagttaatacatgtattctgaattgccatcaattgaaattaacaattggacctaaactaggtccctgctcatacataattaccaacttattgtatatatgcccaataaacttggtacctgtatatgaagacataagtgacaagctagaacaaccctattgtatgaatgttacattcctgcaaataagtctgtaaagtgatttttcatatataaaatctagttgttacctcagttacaatgccatgcttcaacatttgttttgaagcagaaaattatccacgtgttaaaatgatgttattaatttcaaacagttctatttctttgtagaactgcaattaaagcatttgttttggcactaaaatgaactgaaggacaaatattaagaatagtcatagatgtgcctgaattgtactaaaccacaaagtcttgctgcttgtaagtggagccagtcatgtcaatgttcctatgagccttgggtggtaaaaaggggtttgttttgggctagatactactgtataaaccttttctcctccaccaccaactttgaactgtttcttttttattcaaatgacttaatgcaataaaagttatcctgataagttgtattaatgaaatctttgttgaactaattagatttaaaggatgctaagatacttcactataataagctaaccaatacattcttttaaaaagtttttaaaaagtcacccaatttaatagttcataaatcttgattagcttaaagctacacaatatttgtttatacagtttaaggtacagcaatatcttagctagtctttgaactcttccctcttggagccctttcttatacgtatagcggggaaggcaaatatttatatatttgaaaactctagagctacttaagtatttgttgtaagcaaacagtatttccttcagactcttccctcccttcaatatcatcaatgccacttttgggagaaagctgtatctgagagtccttggaaacaagtatccttttattaattcttaacacttataaactgaatgatcggcttcttggctatgtaagcaattacaaggaggtaagatacagacagttgaggaaataaacaaacataagatcaattacatataataagactgacattctaaatggaacttactctgacatgaaagtgctatcatatttaaaattatacatattgggttgctatacaagtctgggtactgttgctttattggaaggctgtttaaaatccatcaataccttaaagctacatctatgaagtttgtacataagcatgtatgtttcaatctgagaaaaatggagttctcacagaagaaatcctatgaaaaaatggtcctttaatgttggccttattgttagcttcctgggtagcaaggatgtcttgcacaacagtatgtcttatgaaaaattaaagcaaaacaaataccgttgttcagtaaaaaccttaccaattccatttataaattcaacttgcaagtattttccattgcacatataaatcttgttaccaaataatcttctacacattctttaaatttttaaaatgaataaagggaatacactgtaaaatcagtaaatgttttcatctaaggcttgaacaattgataattatgcccatttgtttttaacttttgtgtcaaagtattaattttctctatgtcaaaggacttttagatttagaatcacataccaacattgagagtgctttggtttcattaaactcatcttacttagtttcagccctttatacctccttttatcttattttttaaattgacacgtaataattgtacatatttatgaagcatatagtggttttaatacatatgatgtatagtgatcagatcagaataattagcatatccgtcatctcaaacatttatcattttttgtgttgggaacattcaatatcttccttccagctatttgaaactatataataaattatttttaactgtagtcatcctacagtggtgtggagagctagaatgtgttcctcctatctagttgtaattttgtgtcctttaacagatttctctctgtccccacctttccccgatttttgtctagaatcctctgctctttttacttctaggcagacttcctttttggaaccttttgtgtttggtttctgaatcttgcctcttttactttttagtactcagggcagaaatatttcccctcccttcttttagatctctagctttgccttttactttaccactccttgtctgtcttttctgttttggtcatttattacctctggtcatggtttgggctgaacagtggccaaggagccagcatcacaggtgttctcttctaagtatggtcctgtctccttaggatgagcctggttattttccttatccacggaggtacaaacagtaccatcttgattatcctcacactccagcccatgatttaggccatctatggattgtcatttctttctcattatctctttgtatcactactatttgtttcaaaattagcttttaatattatctgaaatcaagagattcttattttaaaatatatatattctgtgttatatttttactggttctcctacctgtgcccctaatatttctttttctttttttcagatggagttttgctctcatcacccaggctggagtgcagtggcgcgatcttggctcactgcaacctccgcctcctgggttcaagcgattctcctgttctcctgcctcagcctcccaagcaactgggattacagggacccaccaccaggcccagctaatttttttgtgtgtttttagtagagatggggtttcaccatgttggccaggctggtctcaaacttctgacctcaggtgatgtgcccactttggcctcccaaagtgctgggattacagacgtgagccactgcgactggccatctgagcccctaatatttctttcagattttactcagcatatctggggggaaaggaagtatatgcagtacatttgaaaggtggaccatatttattcctgagctagctcactttgggcctttctgtgtcgttacatgctcatattcccccacagcaaaggcatttgcattgcacaagtctgttcagatttacgatgatctcacaatgtcattcagggacagaatccctcaatgaatcagagaaaaagagggctaagtattgttggcataggggattgttcttctagtaagcacaggtgaaattctcccttccttcaaatgcgctttgtggtaaagctctatctgttttctggactcatactccttcaaagatgatagagggaatgcaggcagaggtgagacttggagcagtgcttctcaaactctgttgaggatgtgaggtctctattcttctataaaatgaagtaaaaattagtttctagaaaactgaaatgaaaaacaggcccacaacaacatccccctacttttttattattagaatagacagacacaacattaattggccaaattgccttacaaatttctaaacatggactctccatatctatacttaaccagtactggttgggggaccatactttcacagccagtttaggacacttctacccataccagatagaaagtgcttaattttcaaaaaccaactccattagcaggtaggggtgtgggagggtgggtttgctttacttgaatttagaaaatcctgcaagtataggggaaatctgttaatgagctaagactatacaaagattcttagtagaaaataaacataacatttatgcttgctgtatcataacatgatctgtgcagatatgcatcctaaggcttagaaaagaaagctttcgaagaatgggtgaatttaaaatcaagaagcttaaaatttccttccccaaatatgctcttcacagagataaaggctttctccctggctctgtctaaatataagtaagcaccttggaaaacattgagtcagagccctttttatacccttacatgttgcttctttaatgttttgtctgcccactgccaattgatctcaaataagtctaatttttggaaggaatttcattcacattcatggatcctggattcttcaggagcttggagcttctcctctgtgataagaaagcactgcataagataggaagtcaattgggattagaattcaatatgtcagctaactcagaaatcccagtacagaatttagcactcctggtcaacgggtactctccagggatcttggcctccagaaatcaattattggattacatccatctaacccaagagtgggtttgatggtggctgtttttattttctattacgaagagagtgataatgtttattttatgaggatagatggtaaaaacaatctttatttcaaaaatagtatcagttctgttgaatgattttgcgttccacaggattaattttcaagatatttgaattgggaaagctgaaatgactataaaaagcatgtagtgccttaagttttttggaatgaaatgaaatgtgcacccatttaagactttcatttaactcagacacttaaaatatcgagaaaataaatgacttctcttggctaattgtcttatgtacaataaaattgagggtaagtattaggtaaaaggtaagtggtatcattggatttcctctctaattaagaagagatccagtgacagtttgttttcatggggcactttagaaattgtgattgtgctggtttctcatttaactttacaataatttattatgacaagtaacagaaagtagataacagagtttaagtggtttatactttcatacttctatgttgtgttcctgtcttacagacttttatagtattgaataaagggaaggccatcttccggttcagtgccacctctgccctgtacattttaactcccttcaatcctcttaggaaaatagctattaagattttggtacattcatatcctttttcaagtgattaatattaactatttgtacatgatctgtaagcactttatagctaaatatcaaattaagttgggaaatgtccatattatatagttttcatcactctcattttgcatctttgtcatattagcctcattcttaaagttcattaatcacatagacattactgaaacatgtactctttaacattttatatattatatataaacatgtatttatgtacttttgttatctttctaaaaacacttatatgtattgaatcctacaaatctaaagtaagataaccatgtttacctctaccatctttatacaaagtttgtgatggtgtagaattttcagtgagcaatgatatgataacagaaaaatctacttccagactcaagtttatccatagttatgatataaaacacttcagtgtatcttagaataaacctttaagtatattttctgtcagagaatgtcaggagtctttggccagtacttagttaattcttgaaatttcctgatgatttttgtgaaggaagtactggaatattggctgaatttcaaattcaagtcatgagttatgatgctgccatgcaaaactgtttgcttagtaaagactccggaagttaatgagagaagttggcatatatttccaaatggtcttaagggatttggtttcatgattcccattggtgttaaaaaggactccacgactaaattcatttgttaatcaatttaggaaaacaattcacttctgattgtatcttgtttgatagctttgacaataatagatattaaaataccattataattatcataagctcatacttttttttaaaggattctaaaatttgaacggccattctaattttaatatgacagcaagaaatttctttagtggtataaatatgctattactaaaattaaaagatttgaaacataaaaatcatatgatagggtttttatacttagggaagtttccttgtcccagtttgtattcctagcgccatcatgtggtcatttgatgaaaactttctttttcaattatggaaaatttttgttttggcagtaaactatagtggaaagaatattggatcttaatgtaggaaacttatattctagtcctggaccctttatctgattcctctagagcttagtaaggccttatttccctgatttttaaaatatagtgataaactaatttttagggtccctttcagttttataattctgttatgtctgttcatttgttttagctaccacttagagtatatttacttacgtaccgtgactgttccaagcatttccaatacattaactcatttaatctgcatgtagaaatggttacattacaaaatgagtacattattagctccattgtagagaagtaggaagagatacaaggcaatggcacagagaggttgagtctcttggccaacatcactttgctatgttgaattttaattacattcccatcatgttaagtgtcaaccttcaagaatattcacttttaatgttatcgaatcctgctgcacttgtataaactcagtcaaaatagagcaacccaacaattagcatcgtgctgtactttgactacaaattgttttcatgcgttgaactgtgttggataagatgtgtttaagaaattacaatattgcagataagtggccttcctcaacaatttactagtttattcacctgaatgagctcaagtcaatactttctgctgaaaaactgtgcaactccaggtagcacaaaaatagtcttcccactgaagttctctgggaggtgaatatattgatttaataatagttgtaaaaacaacaccttatactgatataatgctttcatatacattacctcatttaatctatacaaatactcagtgaaggtgatattattacccacattttacacatgaagaaattgaaatgtaaggagattagaagacttgcccacaatgcatttatccctgaattttggctaagctgcagtttgggcttttcaatgttagctttttgtaatataacacttggattttgattttcttttgtgtgttccttaacaataacctacattattcagcatgctaattatgtgcactattttgacaaactgtgtgtttatgacaatgagtaaccctcctgattggacaaagaatgtagagtaagttcaacttatatttttaataacatatatacatttgggattttgaaactgtgtcttaatgtagtcttaaaataaaactgaagagcattttattaaagtcattcctagacaaaattacgcagcaagaggacaatgctcattggccctcaggcctgctggcgttatactgattatcactctcttttgcctgtacctggtgttcacctgaagaccaccactcttggacatttacccctttttctttaaaatctacagtagccaaaccaaatgtggtcaaagcaattgcagaaaagagccaatatggtagacattggttccagttaaattccagataaatacattgaatcaagaatcaaaaagggttagttacaaatgccatgtgaagacaacattgaacctcgcaaagttttcatttccatcaggcacattcacttcatgtcaggccaatatagttccaagcgtggtcaccaacaaattgaaaaataatccaaagtttcagggttgtagaacttgaaaattcagtagactgaagactaaactaacagaagtggaactttttgtagagctttcagaaaccagaagcattactaactatattgatgatctctctgttctggggataccttcgaagcacagaggccagatttgtgataactgaagttgggctactctaaccatagctgctcacctgcccacacttcctatttgtaatgcctgttactatacagctgctgacccatagcaactacagaagtattaggttggtgtaaacataattgtggtttttgccattaccttcaattgaagctaatgtttgcaccaacctatttccaagagtgtccaccaacatttgcaccaacctatttccaagagtgtctcctttcctagacacttccaggctgaaaccaataagaaacatgacatcttgaagaaaataataaattttatatacaaaaaaattctaaagtattgaagctaatatgggaggccccacaggttttcagtcgccctagttttcttgtgattttatgccactctcacaccccaatttctgagtagaagatttaaactttggaaacacctaagtttctgaattatcagaagaattttattctaaattaaatttttacttcttataaccctagaagtatttactttgattttaaagaagtccttgttccaagcaagttaaattatcttgtagaaaaaaaaaaacacgtgctaatttgtcagtttcctctcattcttagaacactattaaacttgagatttttttccctaaaagaaaatcatttcatgcttctgcaatattattgattggctattccatcatgtaaacatactaaatatttctcaggagactatatttacataaataccaagacatttcagacaatggctaaatagatttcatataccttgtatttctcacactactcttaagacactttacgaaacaactctttgtgttaggaagctgaatttaaatttagggctacgtttcatttgtatgaaattaaaatccatctgcttagttttcttttttagtatttatctattccactgatggagtgataagaaattggtatgctatgaaaaaacactgttactttatcaaattttttggatgcttgttttcagatacaccttcacaggaatatatacttttgaatcacttataaaaattattgcaaggggattctgtttagaagattttactttccttcgggatccatggaactggctcgatttcactgtcattacatttgcgtaagtgccttttttgaaactttaagagagaacatagtttggttttccatcagtgcttatgcttttaagaataggtttgctttacctgtagaatattttggtgtgatttatacattcaaactctggatttcaatttagcacaacaaaggtctaagtggaatttcactatagcatgaaggctttgcagtagttgaaaactacaattttcacacgtagcatcagtcagaaaatttcacatatgccactcttccacacacacatgcacaaacacacacacatatgaacacacacaatctaatgtcaaaacacaagcatatttgtaatacatctgtgaaaataactttaaaaattacagccacaaaacagttctattggctacacaaatttgcaatgaccttgctgatattacacacagcttcttttattggtttggtaaaataattgaaagtaagtatctactagcatcaaaacgatctgacaaatcaaactaagagaagaaagaagatacttgaaatattatgtttttaatatattaaattactgatttctaagacctgtagaggaatacattctctctgcctctttctgtttctctcctgaccccttttctttcttcttttcttctttccttttatggctctcttcatctctttagtctgaacataaacttccttatccttatctcctattcatatccactcagtaatatgcacagtttatgcaccccaatgcttttttttctagtggcaaacttcctcaggaagagacccagaaaaataatagaaaaccattccagactaagtgaaagtagagtgtagaaggaggcagcccaacaacacttaccctcatccttccttcaggagctgattttttggcctctaacagttgtgatgtagtggataggagcaggagaggtggcactgatacactcaggactccgaatgtctggtcttaatttcctatctgatcaggatgagccaattctttgctaggctctctggtcacagctcaaaagaaggcctacaggacttctatttcttaagaacaaaatggcagtaacaataggcgcagcattggaccctcatcaagtattgttcttaatttgcttaacttttatttaaaagttacactaggaaaatcttatctcatatataaaagcagtaaggcaaactgccttttcatgcctaaatttctgttgggtgatttcatatatttttttctaactaaaaccctaaaccatagccaagatttactttctttttacaagttacacatgatgttggttgcattgctttccagagtgacaacaagggtgtctactttatgaagtttacatttagctaatggccttaaattatgtgaacaaagattaatgatggaatctaattcctgatttaccacttataatatttatcatttaaaatcaccaagaaggtctttataaaagacccatgcaagtaatataaatcctgctaaaatcttgaataattctgatttaattctacaggtttgtaacagaatttgtaaacctaggcaatttttcagctcttcgcactttcagagtcttgagagctttgaaaactatttcggtaattccaggtaagaagtgattagagtaaaggataggctctttgtacctacagctttttctttgtgtcctgtttttgtgtttgtgtgtgaactccctattacaggtacgtcacagagtttgtggacctgggcaatgtctcggcattgagaacattcagagttctccgagcattgaagacgatttcagtcattccaggtgagagcaaggttagataatgagacggacccatcatgtgattcagcatccttctctgcttgacattcagttttacagaaaatcaggaatcataagactaggtgtttcaaagaaaatgattcttattgtttagacataagctttatcagccttggagtttaacaatgtcttatgtgagatactgtaatttgaggtcaaggtgacctgcacttacaaatatcatgggtttttttttttttcaccatgttagttttatcgagaatttgctcccttttaaatgtaccaatctgtaatttcttattcattagagtcattaatgactatgtgtatacaatgcaaatcttctaagttttttgctaacaaaagagaagggaataagacaataaagaatagtgtgagtctgcatggaggatttattatcttaaggcacaattatactgcagaccattttcggttgtacagcaaaatctttcctacttataaataggaattttaaaatatttattcaggtattttgttataaaactgacctctgaccctaatgaaaatatgagacaagtttcagtagcaaaaaggaaaaagacaaggccctttccttaatataggctccatgaagaacatgaaccttccattactctatctcgacataatgggatatgaatcttcatttcattgtttaaatcattacatttctggagtttatcttcataagttcttccccttcaatgaagtgttgcttctccactagcgttgcaaacattcttggatttatgaatgaaatctatgttttcaagaaaattgtgtgaagcttttattatttcacacgtgttaagtcttcatagtaatagacttctttctttcaggcctgaaaaccattgtgggagccctgatccagtctgtgaagaagctctcagatgtaatgatcctgactgtgttctgtctgagcgtatttgctctaattgggctgcagctgttcatgggcaacctgaggaataaatgtatacaatggcctcccaccaatgcttccttggaggaacatagtatagaaaagaatataactgtgaattataatggtacacttataaatgaaactgtctttgagtttgactggaagtcatatattcaagattcaagtaagaattattgttatgtacatttccttaaaaagtagaattggattgtttgtaacacaaaggataaatacttgaggggctggatatcccattttacatgatgtgattagcacacattgcaggcctgtatcaaaacatctcatgtaccccatatatagaaacacctaccatgtacccacaaaaattaaaatttaaaatttaaaactaatgaaataaataaaacaccctctaaaaaagaattactatcatgtatatttggtcttttcattgctaatgtgccttccatctaggaatgaaaaatatttttaaatgattacataacaagacgtgatcttttagaaaattacctaatcaaactatttaacaatatttaaaattatattttatttggtatttctaccccctggattttaaataatagattatttatatttctggaactaaaagaagaattttgttaatcaccttatcaatggcttccacatacatttaacaactttgttcataactactctagttttgactcctaaatgccactttctattttatcatcatttggaaggctgaagaattcagctagaaagaattttcctaggatccttggttgctatacattcttcctgtggtgattgatataatgaaaggagataaaatatgtgaatgccctttgcgaattctacaatactatgcaaatgtaactcattatacattaattacacaatgtctttaatgtatcagaaactgtatagtacactggggaaaataatggaggtaatgcatggcttcagagtgttatagtttaatagattattttattaccttaaggaaataaagtgatacctaaaagtaaatcttattcttatatttaaaaagtagtattacattaaaaagaagaaaattacagttaataaagcttcaggagacagtaatagaaaatgttagttgggtgcagtggctcacacctataatcctagcactttgggaggctgaggctggaggatcacttgaggccaggagtttgagaccagtgtgggcaacatagtgagaccccttctctacaaaaaaaaaatatatacacacatatatatatatatatatatatatactttttttaatgagttgggtgtggtggcatcttcccatctcagcctccttagtagctggtgatacgaatgccagtaggtccacttcaatcaccagctccctgaaatctgttgtttgtttgttttatctaagttcaaaatactgactatgagggttatttagggtttattctctctagggaaaatttattggactgcatttttccaatactcgaagtaaaataatatctgaggtcattttcagctctaaacatctatggttcttattttaaaccaaatgcaaatataaataaaatggttcatttctgaaaataatagaaaattaaatttattaaaattaaaggtaactattataactgaaaaattatattttcctcaggttaaggctgatcattaaggttagatcattgaatttaatgggcaaaacttcatttataaatatgagatatcaaaaattcatccagaaactattatagtcctttctctttgtttaattttaattgaaagttaggaaatactatgtcaactttcctgtctaggttcaaggaagtcagaatattagaaataaaaatgatatttttccttatgtgcttctgtgtcctgtacagaactatgtatggaataaattcctcagaaaacttagcatctagaaaatatatcttcttacaaaatccaacattgattgtttaattccatgtttttctctttttgtcttttatttacttattcattcaataaactttacagaaaggctacccggtctcaaacaaacactaatatagaaataattaatgattgggactttctaggaggaatatttgtaaataaataattacaatatagtagtgtcatcctaagaataattcaagtatatacaggttactggtagcacagtgaggggagttcttaattatgtcaatatttagtagaaagaaagttgaaaataccaaggaaaaagttatagaagaactggacattgcaagaagccaaggagtttgcaagaaacaggaatctttgagataatgtagtgttcacctatagtcattattttagctttagtatttaagactttttaaaattgctttcatttcagttgttgatatgatttatgcatattttactataagttgcctatattctgcaaaatgtgagaatatgttatacttaattattaaaatgtatagtgttaaaaatataggcgagaggaccagaaaatatactattcttttattttgaaatatgtggctgttttgcaaaaacaaagaaattcctgtcattcctgtctatttttactgaatgaatttttttcgtgagaatggtgaacaaatgctaatacctttttgaaagattatgttagtacctgtcattatcactaactttacattcataatgaagaaatactttgcactgtaaagtgtctaaagtatctttgcactgtatctaatctaatgtcatttcttcataatgaagaaatactttgcactgtaaagtatctaatagaatatctagaatttagagggagaagagacaaatacttgtgcctttgaatgaataatatatttaaaattactcaataaacttaaaagtagaacctgaccttcctgttctcatttgagtgtttttaacaatgcaaatgttcatcatacgactttcttttttcaaacaggatatcattatttcctggagggttttttagatgcactactatgtggaaatagctctgatgcagggtaagtcaataatttgtgtgtatctgtgtatatttgtatgtacacatacatatgtgtatcttttctctctttttatagaaactgaagataacagccaactaattttattgacattaatttgctatatgtaaggtttttgataaagtatgagattatgtaaatattaggtaagatttatgttttctaaaacaagaagtaatacttttagacacatgcacacgtatgttcattgcagcactattcacaatagcaaagacatggaatcaacctaaatgtccatcaatgataggctggataaagaaaatgtggtacatatacatcatgggatactatgcagccataaaaaataactagatcatgtcctttgcagggatatggatagaactggaggctattatccttagcaaactattgcaggaacagaaaactaagtaccgcatgtcctcacttataagtgggagctaaatgatgagaacacatggacacatatagggaacaacacacactagggcctaccagagtgtgcaaggtgggaagagggagaggatcaggaaaaataactagtgggtactaggcttaatacctcagtgatgaaataatctacacaacaaaccctcatgacacacatttacctatataacaaacctgtacatgtacgtacccctgaacttcaaataaaagtataaaaaaagagaaaaatatctattaaacacctactgtatataacagcaaacatacaaaaagaggagtaatcctgttcctacttttttaggagtatataataataacaatgttgttcttttagataagtatattgagctataaactctggagactccatagtagtaaaaatgaaatggaggtgttgaaaatgcaaattatcaacaaaaattattttgtaaaatattattagaaatgctgcaccatattttaatgatgacaccaagtagctaataagactatatgcagtcaaaagttgggaaatagattagttacttatttgtcaaacttttattttgaaataccaaatctttctgactaggcaatatcatagcatagtatcagagtaaaaaggcagcagaacgacttgtaatactttcttttaccccacttgcagccaatgtccagagggatatatgtgtgtgaaagctggtagaaatcccaattatggctacacaagctttgataccttcagttgggcttttttgtccttgtttcgactaatgactcaggacttctgggaaaatctttatcaactggtgagaactaaagagccacactctccatttaagtaaaagtatacaagaaaaccaattgagttatgaaattaaaaccggatgataatatagtagaaagagcagaacttgaaacgagacttgagttcctctatcctattgattataacacatactgagcagagtgatgccaaggattgcaattctctcccatttcttcttggctcaaaacctgttccctacccttctcagacacagattgtcctaaacagaaggcacattctcccttcagccctatctaccccctcaaatattatccctcaggtgggaagtaatgaaaatgaaaaagcagatatagaaagataactttggtctgttccttgactttcctaaaggctcaggtcgttaatggaggactccatggcattttattgactgtttcattcttggtgaatacaaaaattctgccatagaaatcatagtgtgaatgcataagctagaagagaaggaagaagctgaagttaaagaaacaataaaaaaaaagtacagggtgctatgaccaacataattactatttatatctgagttttgctagacacatgagtaaattgaaagttgaagccaccacttagtgaaataatattgagaaataattctgatatttttgtttgcagacattacgtgctgctgggaaaacgtacatgatattttttgtattggtcattttcttgggctcattctacctaataaatttgatcctggctgtggtggccatggcctacgaggaacagaatcaggccaccttggaagaagcagaacagaaagaggccgaatttcagcagatgattgaacagcttaaaaagcaacaggaggcagctcaggtaaagctgccctgtctcatggcactgaccttttatcgttctgattgttacgtaatattgaagagaaagtgagtacctaagagcaggtggttgtatgaggaattaataatgatttctatattttgatgatccacttacttttatttagtttaattattttatttgagatgtgtataataataaccacaatagaactctctcatgctattttaatcatcttaagattctcaaagtaaagggaaaatgttattttggggtattttcaagtgagagacttttattcaatgagtagactggcattaggaggaaatcatcttttcttagaacaagaaattattggttatcatatgaagagttgctcctctagttcttaaacatagtctccttttttctttaactaaaaatatgttggcttttaacgtggttgctttattacctttataaggaagtgatcaaataatataatgatctctgatacagcagcatccaatagacatatgaatgttaccaatcttacacagattgaccatctaaaaaggattacttgtttttatagtgaagtgttagtcctcacagtgtgataaatcataaaatgcctctcctatctctctcatctttctgtttagcatacaaacttattgtctttactaaagaagaaagttgtttcagaaatattaatttatatgcaagagtaattaatttatcgaggttaccctgggaacaatgataataataaaaaagtgtcaacttagtaccagtacaagctataatcaaaaagcattgttttattccatgcccatgtgccccttaagaaccagtactgatttgaagatggtggggacagtttttggagaactggatgtcttatcttgctcagcagaaactattgattctcccttccccattcttctggatattgtggatgggtgagaaagggattttataactgtccataaataggattaataatattttgagggtattggacaatccaatttcaataactagagaaaggacctcaggtccttatcccattcccctgccttaaactcatcagcttttcttccatactcgagtttctttttcggagaaaagaaaacaacactaattaaataccaatttttaaagtaaatcaaatcccaaaaagtaatgaatttattttcttgttgatacatgttggatatttttgaatacgtggtctgtggagcattaacagagacataataaatgttaccatggagcaaactaaattatctccaaaagccttcattaggtagaaagaaaaaaaaaatctcctcttatacttgcagagaatcttctctgtgagatgatcttcagtcagttcaatatattttttaaaagccatgcaaatacttcagccctttcaaagaaagatacagtctcttcaggtgctatgttaaaatcatttctcttcaatatagcaggcagcaacggcaactgcctcagaacattccagagagcccagtgcagcaggcaggctctcagacagctcatctgaagcctctaagttgagttccaagagtgctaaggaaagaagaaatcggaggaagaaaagaaaacagaaagagcagtctggtggggaagagaaagatgaggatgaattccaaaaatctgaatctgaggacagcatcaggaggaaaggttttcgcttctccattgaagggaaccgattgacatatgaaaagaggtactcctccccacaccaggtatggcactgctgagtttactgatgcatggttgaaaattaaaacatgggagagagggggagaattagaaaatggactcaggaatttttatcaactgaatcaaccactgttgtgttatatttaaacccatcccttcttcacatagttatgcaaaaactttactccacagatatgtaagtctacagctcggtgtagttaagataacaccaagttgacagtcaggagaactggactgtcattctgatactgtctgctgatatttgtctataactaatgacatttaatctttttgatcctcagcacttttaagaaaaaaaaaaatgtggaactccggatagtcgatcaggaatgtccttaggttattttatgattttatgttttttttccccctaacttctttataagtcaccatgcatgcttctgaaaatattagtcatggtacacttgatcaaaaggcacatgactctgaatttcagaagtatgaacttcaagttccaacaatacaatgccttataggtgaaaaagaaataataattaaagtgattttagaaaggtggactaaagtaaattgtgaggagtgttgaaagtttttgaaagacaagatccataaaaaccaaggtggccttgttaaggtcatggtgccagtgttcactgaatgtttaccacgtccattgccatattctaaggatgtttccctttgaacttgagaaatggtcgttcagggtgtgtgtgtatgtgtgtgtgtgtgtgtttcaatatgttaaggttgcaatctatctcctcattctttaatcccaagggctagaaactttcttttatcaaggtaatttaatttaatgtgaatgcacataaaatgagaatgataatcaaaaggaatgaaccatattctgttatgaatgctgaaatctccttctacataatcttgcaaaatgaaatcacattcaaatgtccatattaatatgactttatttgtttgctctttcaaacttctagtctttgttgagcatccgtggctccctattttcaccaaggcgaaatagcagaacaagccttttcagctttagagggcgagcaaaggatgtgggatctgagaacgacttcgcagatgatgagcacagcacctttgaggataacgagagccgtagagattccttgtttgtgccccgacgacacggagagagacgcaacagcaacctgagtcagaccagtaggtcatcccggatgctggcagtgtttccagcgaatgggaagatgcacagcactgtggattgcaatggtgtggtttccttggttggtggaccttcagttcctacatcgcctgttggacagcttctgccagaggtgataatagataagccagctactgatgacaatgtaaggaagttttaaatagttcaggcatggctggctcactattgctgcaccagccagtgtttctacagaacggcaaccttgagaatgattcctggttggtcacgctgtgaatgcacctgcatcttgtaatatctttaatagactaaccaactaaaacttaaaaccttagcagtctcctgcacaaacctgaatgcatttacttattaaaagtgctaaggattgattagacacaataattactgcctccagttggaggatttgctatatacccacactgaatttagatagcaggacattctccaaggctctggtatgaaagtaaatgaatgattctatgtttaagtgtcaagggtatgtaataaatctttccaatggattcttcaagatctctgctttagtttagattttcaaaaacactgcttaagtagatagcttcattgttaccttaatactcctagtactcatatttttcttactaaaaaatgctgatataggtcttctcaaaattaaatgaagagacacaaatacattattaatacagacagataaaataattgtctgtgtacaaaggtatgttatgtgtttgtggatgtatactcagatgaggaatttctaaacagatgctgcctcttcttagactgtttactcacttggaaatatatcagcatgaggaggcatgactaagtcagaattagatgacttattgctttggtaccctggatgaaactgttgtccatgcagcatgtgtgtgttctttttaacatagagtttgtgttgtcaatgaccatctacatcttgtgtccagaaaataagatggcagctaagtgtgttgcaatcatttatacttccttaaaattaaatagctaccttctcaaaaatcaagtgccttgatcacttgtaggacttttaagttactaggcttttactattagttcagaaataagggtaataactgttaaatatatctcttaagagttttatcaactatattaaaattattttgtattttataaaattatgaaatcaggaagttaacatcttggtttttgctgtatgactaaatggttaacagtttgaacattccaggctaatgatacaataagtcagaaatatctgccatcaccaattgaatatgaaagtgcatgatgcatgtgtttcatgaaattcactgtgtcaccatttggttgtttgcttgtcatattgctcaaattaattgtttaatgcattagcatttttttttacagggaacaaccactgaaactgaaatgagaaagagaaggtcaagttctttccacgtttccatggactttctagaagatccttcccaaaggcaacgagcaatgagtatagccagcattctaacaaatacagtagaaggttggtaacaaattctattttcgtttcaattattttcaccaaacttatattgtctcatttcaaacaaatatatttgtgagttgggaatagtgcattctaatgaaaagacagtctaattcaagagctgttatttcttatatctactcagatattctagaagccttaacaatttattttaaaatgagtgatattgggactaagaatgttttcctaactgtgtagcaactctttgaaaatgcagaacaaagcatttctgttaggggtttctaatctcattagtcatagtgaccctctttttgttccattagtttaagacttcagcagtacagcccttttcagcctcatcctaagtactctcaagattgtagaggaagagcaggtcattttcacaaaataaaaacaagctaaaaagatgattcttgggtcacatcaatccctattctagctctcatagtctgaggttgacaatgtagagtcattcacatagggttgcacacacaatatctacaccaccctaaaccatgttcccattgagacgtcacatgaaagaccactcatttaacttgaggccaagtgctgagccacaatgtcagtgcataagacaaaaaactacccattgttacctgggctctatgtgtgtgtctgatgaaatatccttgggaggtttagagtaaactgtaatttttttaacaagtacaaaaaaggttgtctctgtaacaaaaatgtgttgattactgaaaataagtttagtggatatgaaataaatgtgtgtgtataaagtataccttttggtggttcttttttttttttttcttaatctagaacttgaagaatccaggcagaaatgcccaccctgttggtataaattttccaacatattcttaatctgggactgttctccatattggttaaaagtgaaacatgttgtcaacctggttgtgatggacccatttgttgacctggccatcaccatctgtattgtcttaaatactcttttcatggccatggagcactatccaatgacggaccatttcaataatgtgcttacagtaggaaacttggtaagcatattggaaggtaaatgtgtttagtcttcaaattttctgcttgaaaaactgtttacatttaattgtgtatagcagtctttcaaccatccttcatgcttcctggcccctgcaaaatcgcaattatatttagctggctatactctacttttttgccaaaaataatcacccttaatgtgctcacaaaaactgagaaaggcataggcctacagcactacttgaaaagtcaacagcaatatttataatttttcaggatccagaagtagctcatagattaagaacatactttttgagatattattacaatttcccttactgtagaagattaaaataaaattgtggatctcttttatccttcttagtcatcatcactgcaagaaataatttaacaactcaaaaatgtctccagcttttcctcttccaggatctaagtagtacatgtattgtttatccatctattctatatcaaaaccatgaactattgaaaacttccagtacattttgtgtgttatatgattacaaaggtcatttttggtgaagattgccacttaatttttcctttttgtgcttcaaaaacataaattattaaagtgtttgccagtcaactcaacttaggaatactagcttttatttgctgaaggaaagagctatctaaagtaatttatgcatttcctgtaatatttggtttgaagtttaggatttttgatggtagaaaacaaaagcatcatgcataacaacctgcattttattagttatatttttgaagttctactatttatactacagaagtaaatttatttttttcatgtgcataacaaagaatgacaatagtaatgcacctagtataatagataagaatgtataactctgattgagggaaataggaataagcttatagataaataaaagtgctcatgggcaaaatgttgtcagtacttgtggtatataaagtctggacaaaaaggtagtttggtataatggaaagagcactgttaaaaatagatgacttgggctgggcgcagtggctcacgcctgtaatcccagcactttgggaggccgaggcggacggatcacgaggtcaggagatcgagaccatcctgcctaacatggtgaaaccccgtctctactaaaaatacaaaaaattaggcgggcgtggtggcgggcgcctgtagtcccagctactcgggaggctgaggcaggagaatggcgtgaacccaggagcttgcagtgagccaagatggcaccactacactccagcctgggcgacagactgacactccgtctcaaaaaaaaaaaaaaaaaaaaaaaaaaaaaaaagatgacttgtactcaaatcctagttttgccattttcttgctgtatgatatcaagcaagccatttcacccatctgaagacctcagtttccttatctgtaaagtaataattgtatattatctacttcgcgtttccacaaggataaaattaaataatgtatatgaaagtctttcatcaactacaaattgccatacaaatttaagttagtaatagaatcattgtgggaaaatagcataagcattatgttctaagagcaaatcttatgtcatgtatgttattatctggtggaattagattaattttgttttgatcttaggttttcactgggatctttacagcagaaatgtttctgaaaattattgccatggatccttactattatttccaagaaggctggaatatctttgacggttttattgtgacgcttagcctggtagaacttggactcgccaatgtggaaggattatctgttctccgttcatttcgattggtaaaaaaaaaaaaaaaaagcaccaaattcaaaaacctttctaacaatcagggttcttgcatagcaatgtcatagtttttttgccacacaaccattagcattgtaagtttttctgtaacatttgcattgtcaaaaacttttcctacatggaaaaaaattctcaattatttatgaaaacctttatttcaaagaacatagttacgtaaaagttaacgtattactcagttgctattttcactaagtattgcttctagagactactacagttaatatttctagacctaagaaaatatttttaatgaaaatgcatcaccttttaatagtaacttgaaaatatatatagccctttgtagcagtggatgaaaatcagatgtaagatgtgcatgcagaaactttttctaattctgtctctggaaaatatgcatcttgcgaaagtcaaaggagagaaagtctgtaggattactaagcatgcccattaattcacacatatatccttacaagtcaggaaaataattgtagaattataggaaatattccaagtttttcaatgcaggtggatgtaactacatgaatacccctaaggagcattaatgaataatgaacactttacttatatcagggctcagtatgatgttactttgcacactactggcaaattaatatctttcagcagagatatttcagattcagatgttaatattataatatccggccttagaaccacctttataaaacaaattaagaacagttggattccaagtactcattaaaaattcactataagaggcctggcttggtggctcatgcctgtaatcctagcactttgggagactgaggcagttggatcacttgaggtcaggagttcgtgaccagcctggccaacatggtgaaactccgtctctactatatatatatttaaccaggtgtggtggcacgtgcctgtagtcccagctacttgggaggctggggcaggaggatcactttaacctgggaggcagaggttgcagtgagccgagatcactcctctgcactcccgcctgggtgacaaaagaaaaaaaaaaagaaaaggaaagaaaaataattcaccatcagagaaaatgatctacatggttaaaatatggaaaatccagcttttcctagggagtccaaaaattagccatgagcctgagacggttagggcagatcagatattgtaagatattgaattctaatgaccatttctaggtaaagctcaatatatataatgcttttaagaatcatacaaatatatattaatctttcattttccagctgcgagttttcaagttggcaaaatcttggccaacgttaaatatgctaataaagatcatcggcaattccgtgggggctctgggaaatttaaccctcgtcttggccatcatcgtcttcatttttgccgtggtcggcatgcagctctttggtaaaagctacaaagattgtgtctgcaagatcgccagtgattgtcaactcccacgctggcacatgaatgacttcttccactccttcctgattgtgttccgcgtgctgtgtggggagtggatagagaccatgtgggactgtatggaggttgctggtcaagccatgtgccttactgtcttcatgatggtcatggtgattggaaacctagtggtatgtacccacttaagatatgcattttggaaatacaccagcatggcacatgtatacatatgtaactaacctgcacattgtgcacatgtaccctaaaacttaaagtataataaaaaaaaagagtataatttaatggtgactgttttgtcaaaaagaaaaacaaactatgattattggtttaaaagtccattaccttggatatattatcactttaacaacacagcaatatagcagtgcccctgcattttttataccaaattctattttgtcagtcactttatcacattttttatgtgaattacaatagagtatcatattgagatgagcctaaaaggatgtgctgggaccattttataaattcagagccaaggaagagagaagtctaaaaaaagtagagagaaagtgcaaaattaccatccagactaggactaaaaagtggtgtctttaagagttcataatgcttgtgccatttctttgccccattgcagcatatgatattcaatcactctatgtcatatggcagatgcactagccaacctgagttcatcagttctcgaatggctaatgatgcctgagattaccataatggagtaactgatcaatctttatctctcttaaatttggagtgttactgtttatagtatagtaatacataaaatattctaaaggtatgtacattcatgtgccagtctcatggaaatatgagagattattcataaacagctctacttagtcaacaatgaagtatgagaaatataatagattaagaaaacaagtgtcagcctatgttaagctcctaatcttcattctgagttgtaatggttatttttcaattgacatccaatttaatatctttgtttattgaaaaattatagaatgcatttaaatgcatacttggaaacattagtgatttttaagaattctcgtattgtacacatataaatctgttttcttctactcatacaattttagagttaacaaaaccttagattagctcattcaatttcactttacgaatgggagaacttgagagcaacagaaatcatgtctttgtccaaggatgtgctattgagccagtcacaaattcagatcacccatcttctaatcactatgctgtggtgtttccttctcatcaagttttagaacttagagttttttccacacttaaaagaaagaataagtgattgtaatctgctcttccctacattggtgtaaaattataatcatgtttttgttgtttttaaggtcctgaatctctttctggccttgcttctgagctcatttagtgcagacaaccttgcagccactgatgatgataatgaaatgaataatctccaaattgctgtggataggatgcacaaaggagtagcttatgtgaaaagaaaaatatatgaatttattcaacagtccttcattaggaaacaaaagattttagatgaaattaaaccacttgatgatctaaacaacaagaaagacagttgtatgtccaatcatacagcagaaattgggaaagatcttgactatcttaaagatgtaaatggaactacaagtggtataggaactggcagcagtgttgaaaaatacattattgatgaaagtgattacatgtcattcataaacaaccccagtcttactgtgactgtaccaattgctgtaggagaatctgactttgaaaatttaaacacggaagactttagtagtgaatcggatctggaagaaagcaaagaggtaagattctataggtgtgggaaggtatgaatacatatacatatatacatatacacacatacagatgatcctcagcttaatgatgttttgacttaagatttttttttttttttactttatgataatacaaaagcaatagccattcactagaaaccatgctctaaattttgaattttgatcttttcccaggctagcaatttgtggtacaatatactctcatgctgggcaggggcagcaagctgcagctcccagtcaaccacgtgattacaaggataaacaaccaatatttaccgtacagtgtactgtattcaggaaattacctgagttatccaacagtttattataaatcatgctttcctttagatgattttgcccaactgtaggctaatctacatttcctgagcatgtttaaagtagactagggtaagctataaagtttggtagttaggtgtattaagtaagttttgatgtacaatattttcaactcacaatgagtttatcaggaactaacctcattgtaaattgaggaacatttacaatacatgcattatattgcctgtatttattattatatattttccatatagatttttttgacatcatgtaaaattttatttcactgaggaacaaaagatttaactcggaaatgactgataaattaaagggtaatatagtatacgtgtgagttttctcatccttagtaatggatatttgttagatgaatgaatgaacgatctaacaaatagacaaacatcatcagatttaatccttacaataacctggaaagaaatgtgttattatgttaacttttcagataagaaaattagcttagggagcattaggtcacatagctagtgaggggagtgccgagagttgaacttagagcccttgtttacaagttctgtttattgttttttgcatcacattggctcatgtacattgaagagaacttaacaacaagaaatattcttgtagctccttcaactaaaattacactgccctatgcattagcctgtttggactgccataacactataccataactgggtggcttaaacaaccaaaatttattttctcatagtccagaaactggaaagtccaagatcaagataccagcagcatcaatgtctagtgagggctcactccttgggttgcagacagccacctccttgctgcgtcctcacatggcctgtcctcaatgcatgtacatggaaagagagagaactctggtgtctattcttcttcttataagtgcaccagccctatcagaataaagtccaacctgtatgacctcatttaacctttatcaccaccttacaggccctatccccaaatacagtcatattgaaggttagagcttcagcatatgaattttgtggagacaaaactttaatccatagcaacctactttgaaatattaagttaaaagtctaatggatatataagataattaacaaggagtctaggacaaagcacctttacttcccatttagtgtttggaaatctcaaaaacagcagggtgcccatcttttaggctgtatagtctaaatattttaaaggattgaatacattaaagacattttattagagatacaattctattagatatcatcatgtccattgcattttgatagttgtccatggaagataccacaggtatgtgacattcttttgatttagtgactatatcccttaaaagatgcttcaagtatttataatgagtctctgaataatctaggtcagcctccacttttaggagtagggggctaatattggagctggaagcagctgccctgaccctagcattagagctgcttagttaattcagatttgtttgatgagagaagggaaagaaatatagtgcagagatgtaatagtagatagatcctgtcacatttccatgtctatggaaatagattcaggacaaaaaaaaaatagactgtttttatcaaatattgtggacttttttacagaaattttaatttggatattatgtcagttcagactttgtttatttgagttttcctaaggaatcagatgaaggctaattttttgaaaaattgttgtctttataaaattgtttctgaacttctgttaaaataaatttagtaatagcctagtctagcttcctttgtcttgaatctttagacctacatttagcatttgatgaggactaatggctaccatatgctatctgttatattaaaaaggaaaaagactattttacaaagaccatccataagatatacattttctgtaaaaatttgacatgattcttactcttattgtttttttatattgatcaaggctaaaagaaacactaacctttttataaagcaactatccactgaagcactagaggtagttctgtttctttctactttgtggtattttatatcttggaacattgcattaattgaaattttaaatgttaaggtaatagaaactttagagataatttaatgtggtgcttctcaaattgtgagtcatagtttagttagacttgagaaatccctttaataggccagtttttttttttaattttaatgaaatagtgatccgcccacctcagcctcccaaagtgctgggattacaggtgtgagctactgcacccggccaatgaaatagaacagaataacgttagagcacatttcatgtcagagggagaagtcctggtaaatgaagcttttgccacctgtgctgaactttaatgttttgtttgtctaattagaatgcaaccacttggttcatgggcatagtgtctgaagtccaggagttcttaagcttcagaaagactgtttcagctttttgaaggtagtgataatgaagccttcctaaccctaggcagaacagattgctttcttttttggttcccagagatataaggcatagagtatagtaataaataatgcatcttcttgactcatgcgtcttacaaagtactatcatattttagggtagctacttatatgcatgcatgtctctccttttatgtggtgacctacttaaacatgtttggtacaaagtagacactcagatcaaacttttccagctcattcaactcttcttaataaaaccattctgaagggctctcataaatactttctctgattagagcatacttgagattgtcattttaattccaattattttggaccaattttttctctagattcaagattcacttgagttagattttgttgtttttgtttttgttagccatgttaccttgtcactttacaccacccttctaagaaagtaataatctctcatcttttccacatgaattgctgttgaaatgcagttgtatctcatccagacgaaattttgtaattaaatactgaaacttctatttatcccctaatgatacatttcaatttcttttattcatttttgaatctggctttctttttatattctttcacagattaccacattgtatcaaatttcctggcacttttacttcacaattcctttcttcttggtcagaaataaacccacacaatattgtttgccctcattgcttcatcagtcttatactgtattctgttcatcaaagtaaggcataaattatgagatattctgcttttagaggaattaagctgacagcagatgccccaatagatgaagagtctttgttctacattaggaatgctgcctgtagtatattaatctcatcattttggttctttttgttttagcctttattctttttgcctattttcatttatttatcagttatcatatgccagggagactagataaaggagtatactaataagctataaggaatgattttctctctctgtctctgtgtgtgtgtgtgtgtgtgtgtgtgtgtgtgtatgactttcaacctttaagtatgaattttcatattgagacatatgttactgatgcaaaaatgttacctttcatggcctctattagactagtttcatttgaacatgttattgtttccattcctgaattccagtaatgacttatctacaatgcatcattataatacctccaaaattatattaatgccttgtgttaaaattacaagtgcccactgtttattcttcatacactaaatatttgtttttagacatgtgaggccacagttataaagttggtaaatggttatactctggagccagatactgggttatataatttcattttagccgcttactgtgtgactttacctatctaataatcagtttcctcatctcaaaaatgtgcataatgttactgactgcatttctgggacagagtattaaatgagataataaatgtgaagtacttagcacagtgcctaattaatatagaatatctggtaaatcatcattattattgttaccagttgcattccacactgttccagtaagttttcttacaagaattactactggtaacatactccactatttgtctttttttgttgtttgccttttgccctctgtaataaattgttttataagtttatctggggatggtgatacattttatattttctgtttatttttaaattgttttgattacattcttgatatggtaagctccttaaaatatttaagaaaattacttttctaaggggcattccaatcaggaaatacaaacatgcagaaacctaaagacaggaagcaagaggatgtatttggagacaattagtagtttggaattccgggggcgtaaatcacaggagctgaggatgagatgtaggtaaagagtcttggtttccaggaagcaagaatagactggtatgaagagatgtggtgaactggaacctcatatttattttgcctcttacatctgtggtgaactcacacctaactatcctccattccagagcaaactaagggctgttttttctacaccttcctcctattggtctccaaaagaagaaagggaatagcatgagtcacatttcatcctctctttaagtcctaagagacttcaaccttcaaagtacattcaagtaatttgaggaattgttttttaaaacctcagaaaatttcttgactcatgccatagtaggaataatgataagctagaaacatgaatttttattgaacattaataataaagaatggtgacttggacagatctgagagagctttgaaggctgggcaaaactgccaagactatgcaaaagacaatataaaatcttatctccccaaatagaaagtaaatttattttggttttggatagtattttataacatttctatcctccgaagcacctaccacaatgctgggtgcataacagttgcccaataattttttgaggtttggttgatttatatggatactagattaagagcttataagccttaactctactatgagcaaatcgctaaatctatattaccccgtttcctaatttattaaatgagatatctgtcctatgatgcttatagaaatgttatgaagatctaaaagctatttggaagttaaaaatgttcaaaagtgtaaggtgatgtcaagaaaattactacttaattccatttaaataaaaattttaaataaattgagttattaaagttgtaccttttgggaacaaaaaaggcacattactaaagtaattataaaagaaatacatttgtttttgcgatgagtgagctctagaataatgagtaaaaatgtgaggtccttagtaattcaggttatgttaataacagctattgtttaaatgttcaccatggacaaagtactattggagggcatatattgtcccattcagtctttatgccgtaagacacactgttattccagccttaagatgagaaaaataaacatattttgaacaaaggaaaacttgccaaagttacacaaacagtaagtggttggtcctggcagtctgctccatagtctgctccagagtcacgctcttaaccgctacactaaatcttaatagtgtctgaaaatgtactttctttggcatagttctgaaataaataatactatttgttgaagaactaggtacaggtgtcaactatagatttggtgttaacttccaatcactgcacattgggcataggttaacagcatagtctggagtgtttcagagtcctcctgcttagtcctgaaaggtcctgttcctctggtactggcctgcactttaggctgatctgcttctgcatcccacactgacctgtggtggtctaattctacttagagagcacttagtctcccagagtgtgatagttgtgcttaaggagcatccccttctgagtttaaagctgctggaagagtcttccaaatcattaggaagaacttctatgatgtatcattagcttatgaggtctttgagaacaggaaaaacactaaccctgtcttcccttaagtccacagcacatacaacatatttattaaatgaatgaataaataggtgatgggcagttacttctagatttccattttttcccaattatatcactgatatatatgcattttaaatctacttgttgctttgctgatatttttccatctaatacttttatcttacgttatatgggttaaggaacatacgacaatctccaacctaagcacatagtctctaagagatggcaactactctctgcgaagagtactatccatggaacccaagagtactatctccactacttctaattgatcactagggactgccaaagctacctatctttgtccacctctctgcattcccaaggcctttacccagtgtcagacctccatcatcttccagttttactgctacagcctccaaacgggtctcctctcgctagtgtagtcttgacaaaacaataggtggtctttctaaaatgcaaatcccgtaaccgttctgtcctccctaacctttcaggagttgcccattgctcacagtatggagtctatactacttaacatgggtacaagtccctgcaaaactgaccaccgctgactccttcagtatcatggaatagtacacctcacacctccccacccagctatactaatctttcattcaatgtaattccctatgctttatcagttctcatcgttataccttttctctctgacaggaatactctcttactctatcctgcttcacctgactcatcctcacccaccacatccttcttgtcccaaatgtcactttattctaccctgtccttcctagattgagctaggtggtgttctcaatatactctatactactcctattagagtgtgtggcaattgcttctctgtatcctccatctgattgtgaaccgacgagggcagatactaagtctattatgttcactattttatttttcaagtcctagttttgatgcctggcacatttttggtagtgaaaaagttcaaatatcaataattacacctattacaaacaatacaatactgtgatggaaattgttaccatttatcaaataagcatacgccaaacgttattcatgtgttatcttgttcagtccttataacaaggatgtgaagtaagaaccattttacaaattagaaacctaaagcctaaggaggtcagaataattggttaaagtccataaaaccagtgattgtgattcaaactcaagtttctctgatcctctgaacagtagtactttcaactctttcattatatagatatacagtttatttgcccagtagacacttattaagtatgttataatttaacattaaaaatcaatgtcaaaataacattatagaagctctgtgctcaatttggcaaaatgaatttaacaatgaaaattactcatttgatttgcattttggtttctagcttggggattataaatgcaatttttcagaatttttttgttttctttccaatttttttgtattaccatgattttctattgactcaatatgtctgaaatatgttgcttttgttcccttatatttaattattgatacagaagtttatgtgtgacctatcgaaagcaaaattcagagtagtatattagagccgtattcctccacgttcacttttatactgggcaagtgtttgactaaagaatagaaacaactgacattctgtaaatatgaataatcactgaagattgtcctttcaacatacagcttgatgaagaaatcaactgggaataatgtgggaattaatgagttaatatttgagttttctagctgccctgtggaaatgttgagtctcattacagtgtcttttccattgatattatattttcctttgttgagagtctttaataggggtcattttaatttttaatatgcatagtgtacaatagaaatatttactagtgcacaatgtacacaatgaaatattaatactagcatttctgaggttgtagagaacctcattttagcatgacttaggagatatatgtgtcacaatagtaaagtacccagcattaaaatagtacctgtccagctttaaaaataagtactttggataatattctttatatgttaaatatatacatgtgtatgttaaatatatatattaaatatatatgtacacacatatatacatatacaaatatatagacatcgcatgaccacatattaagtatgcttttgacccttaaattccagatttatttatattacttattataatttgaactcctactaaactctataaataagctccttataacaaaccaagtttaaaaataaaaatataaacattgtaggatcaagtcagagaacaagaaaaaaagcatttaatcacttactctcagagaatattgaagaaagttttctttgccttgctttgttttgccttaccctcaaggtcaaaatcatttgctatagtaaagagcattgttaaaaaacaagaaatttgcataaatccactgcggaggaaaactgctcttaccatcagggttgtagttattaagtggttattgaatgccctggtgtacaaggcaaagtggatgcttcatatacaacgtggtctctgcattctgtcagctcacatattaagtcagcctgccaaaaatacatggatgatacaagtcagtgtataagtgtataatttagctattaagattcatgtgtgaaaatatacatattcttaaataaactagcctatttagaaattggtaaaatttaaggttgattcatggtttaataaacattaaaatagattttaagaaatattccgggaggccgaggcgggcgaatcacgaggtcaggagatcgagaccaccctggctaacacggtgaaaccccatctctactaaaaatacaaaaaattagccgggtgcagtggtgggcacctgtagtcccagctacttgggaggctgagacaggagaatgacatgaacctgggaggcggagcttgcagtgagccgagatcacgccactgcactccagcctgagcgacagagcaagactcagtctcaaaaaaaaaaaaaaaaaaaaaagaaagaaagaaagagaaatattccattaatctctaaaacagtgagaacaaattactttattagtgaatagcaaatttcaaaatgaaattaaatttcaatctaagaacaaaaaaggaaaaattaattggccttactgatttttaaatctgtaaaaatacttatttgagaatattttagttttgccgttattgaatttctttagaattttatatgaattcgtatttcatgtgctaacatagaggtggacttttcctacacatctgaagaggagcttttccttccctttttgagtatttaataataatagtgttattatcccaatcaaataaagaattggaccacttcatcttttatctcaaccgttataagaatatattgatgcaaatatactggttatgaaggttttaatacaacttttttagcctatggtaaaatattttaaaaaatagatgacaacatttagattttggataatattaatagcaaaagtaaatatgactgtatattatctcaaaaaacatatttacagaaaatttttattttcaagggttcatggaatatttctataaaagtaaccatatactggagttcaaagtaaagctcaataaatttaaaatagctggcatatagggttatccagtcacaatgtagttaagcctgaaattaataataaattgatagaaagaattccaaccatttgaaaattaagaaattgcctcctaaacaaatattgaataaaagcataataaaataccaaaatagctatttcaaaaataaaagcattttatgtcaaaatttgtggaagaagaccaagtagtcattaatatgacttaatattactaatatgattaagaagggatgaaagaacctaacaaatatctttgagaaattagaaaaggaacaaaaaaggaagaagatatacataaagagaaaaaatagtgaattatcaatgtagcagacaatattggtataacaggttatggttcttaggaaaaaaaaatcagtaagacacacaaactttggtgtatcaggcagaattctaagatgatctcaatgacacttgcccttgtataatccccactccatgagtgtggttggaacctgtggatatggtatcaccctttaattacattacatttatgacaaaaagggggatgatgctgggtgggcctgacctaatcaggcaaactctttaaatgcacagtgatttctcctgctatcacatagaggaagctgaaaagatatgctctgcctggcctagaaaaaagcaaacacccatattgtaaattgcatacagcagccatgtggccagagactatgggtggcctctagttgctgagagtggttctgggccatgagctggcaggaaagtaggaagcccagtcttataattatgagaaatgaactctgccaacgacagtaaacttggaagaagatcctgagccctggaaaagaactggatttccagccaacaccttgacatcatctcaatgagaccctgagcagagaatccaactaggcagtgccagacttccgacctacagaaactgtgagttggtgaatgtatgttaagatgctgggtgtatgctcatttgttacacagacacagaaaacaaatacatttggcaaataatccttgttaggaaaactcaaatgattttctatgtgtaaagagcaattgcaatcaaataagaacactaatactccaatagaaaaataggcaaaagaccaagcaccgtggctcactcctgtagtcacagcactttgggaggccaaggtgggtgaattgcttgagctccggagttcaagaccagcctgaggatcagatgctgtctctacaaaaaatacaaaaattagccgggtgtggtggcatgcacctgtagtcccagttacttgggaggctgaggcagaattgcttgaacctgggaggtagaggctgcagtgagctgtgacttcatcactgcactccagcctgggtgacagaatgagacctgtctcaaataaacaaacaaataatagtcaaaagagacaagtcataaaaaatataactggaagacaaaccttaagaaatattactcctaattgttatcaaataagttaatatcaaaacaatggtagtgtaatttctgcttttcaatttggccaataaaaaagaagaaacaaaagcaaaacatgaaaaggaaaacaaaacaaaaacccaggtaaataatgcattatgctgatgaaggagatccatgagacagatacttaacacaaatctcagaacatggtatctttcaataaatgttgagtaattgaatatttcatatacagctaatagtgaaattaaaagcccagctacatgtggatggtttctttgtctctaaggtgggaatagctatttgcttctccttggtcagagatgatcacaggatttttcatttatttatttgtttgtttgtttgtttgttttttgagacagggcctcactcggtcatccacgccagagtgcagtggcgcaaccacagctcactgcagcctcaacctcctgggctcaagccgtcctcccacctcagcctccaaagtagcatgcaccaccacatccagctatttaaaaaaatttttggccaggcgcggtgtctcacactgtaatcccagcactttgggaggctgaggtaggtggatcacctgaggtcaggagttcaagaccagcctggccaacatggtgaaaccctgtctctactaaaaatataaataattagccaggcatggtggcaggtgcctgtaatcccagctacttgggaggctgaggcaggggaatcgcttgagcccgggaggcagaggtcacagtgagccgagattgcgccattgcactccagcctgggcaacaagagcgaaactccgtatcaaaaaaaaaaacatcatttttttttcttttttttagtagggacagcaggatctcactatgttgaccagactgatcacaggacttttttagccacagtcccaacatgttacccagactgtgcaggcccagcagccatacccactctgaacttcctcatccttttctcctcctgagtccagatctgctccctcatcaccttctcatcagtcctcacttcatatctctcttggatttaagactgtccaaatgtatcatttcaaattctcaaacactacaaagtcatagaaaattaaagctggaactttaaagatcatctcttcattttacatatttaaaaaatgggctaaaggaagaattatttgagcaaagccacgcagaaagtaagaggtcaaaccaggtctgggtttctttccagtttattgttggtggctttctttccactactgtggcctgggccaggagaagggtgaaaaaataaggttgttggctccactggaggccataacttgttttaaaagttcttggaatagtcaattcagaaatggtgagtgacagatgtggtttggctgtataaagtaatttacatcatctacttactccatatatggatcattttaccacatgataatgtatacacatattctgcatatatgcaaataaaatgaccaatatgcatacttattgtaatgaggtatagctataaaatattcatagaggcaccatgttgaatttaaaaagagctttaaagttgagaattttgcatcctagtttgtttttttttaacctattgtgtgctttttgccaaatcaattatactatccaggtctactttaccaatctgaatattgcagttttctgaggtcatgttcaattccaactcctctcagcttctagtaaaaaacctgagtataatttgtcaagtttacctgattggtagtatatgttttcacgtagcaaagctttcacattttgctgcttctgtaagcctggttgttggtacttaacattaaaaagtcagaactactaattatttatttcttgaagaaaaaagaaaacattgtaacttttctaaaatgattcggtgtgacatgatcaccagagtgacatcccattacttttgccacattgtattggttagaagcaagtcacaggtcctgcccatacataagggcaggggattatacaagggcatgacaacagtggccagaaattttggagaccatcttagaattctgcttactacagactgtcatgaagaaagcatgtttgcagacataaagaagagattcttacatgtcattcaacatactgtcaattcttcaagtttatagattaaacccctgaaataacttttttaatacccacaaagatactgtctcttcacttggtattaccccgccccccacctagttactagtggtgttggtgacaaattctaaactttaagagcctttttaaaataatagctctttgcattagcttagtgccaagttgtttcatctgaaattgctaaatcttgaagatttttttcattttatcaccttttttccactgaaattcatgatactaaattccacataatttcccctatattcaccacacatattttttctttcatttaacatcatcttcttaaatttgggcatgcatttccccaaattttgattcaattatggttttccaatacattttcaaaattttttaaattttcatttatgtatttatttattttagaaatgggatccagctataatgctgaaattgttcccaaacttataagttcaagcaattctcctgcctcagcttctcaagtagctgggactatagggagttttccaatcttttaaataatattttaatcaaattttttcatgtatcatgcataaattagatgaaagtggaacttccctgcttgaattaaagccttcagccacttaaggctggagtgagatctctggagaacattggctggaaacacctcttctgtcatattagtaggacagatgcctttcattgcaacatacatactgaatgttggtataattgttgattgaaatttagctgtacaacttatgatctgcagatgatagactttctctaagttctaaagtacattaaagactaagcatatagcattttagaaataatttatacaaattatgtgtttaagcttaatgcctttcttgtttttataaacttactatcatctttgagaaggtctgggtgacttttatattaatgtttttatttattttaatctattgactatgtaaaaggtttactatttgtttaatttaattttaatttctgtattgtattccttatttaacatgccaatcaaaactcttgttgttccccatgttttggctaaaaacagtttagttcggtcacttgtgaacttattttattttgtttgtttttctttcctttcttacactaatgctcatttatttacattatatataaatttctagaaaaagcactaacacttctctcaggttatcatagtttatctagagtaattcattgacataagccccactgcttatggtttaatctttctaatagtcacatgtcactttttctgatgttattatgatttgaaagtaggggaaaattcttcttactattatgagaatcagggtctatcataagggttagccatgatgtggcttaccagcctccctttgcaaaatgctgacttgcgaagtagagcttaagccaaatatgaataccattttttaaatctaatttttaatcatatattgttcctgaaagatgtatacacttctctggatcccaaacattcaactgctccatttatttacaaaataaaaatgacatgtataaaaatgtcactttaggtgccttgttccagcatgggttcattgtttggagtgctacatcaatgttttagcatgagctgcacttgtaattcatcatctattatttctgtttagttttttttttcccccagaggacaaatatcttaacgaatcatataaagcaacctgaatttagtatcttctcagaaatttatatttgtaactatttaaaaagtaaatattcacacctaattttatggttttttaatgtacatgtatctatgtgggggatttaccggtgttacgtttattcaatgattttgacttagtttttataaatacaacaacactttttaaatgcatttttcaaattctacaagattaaattacacacttacagtattttagaatagtgtaaattgatttgaaaataaacataacttattcttgataagcataccattcagctggtgaaaatagaaatgtgcagatatcctaggcagtagccaacgacctgagcaatttttgcacatcaaggtcatcagttattgtattttactgagaaaactgcaagtgtcattaattttgtaagtaagtccattagaatgaagagaagttataataaaatatatgcccaaagtagtccctgtaaagtgttgaaaggggtttaaataagagagcaattattactcttccgcaatgatgggaggaaaaatcactaggagaaaaagtcagagaacattaagaagttcaccttgggccgggcgtggtggatcacgcctgtaatcccagcactttgggaggccgagacgggtggatcacaagatcaggagatcgagaccctcctggctaacatggtgaaaccctgtctctactaaaaatacaaaaaattagccgggcatggtggcgggcgcctgtagtcccagctacttgggaggctgaggcaggagaatggcatgagcctgggaggcggagcttgcagtgagccgagatcgcgccactgcactccagcgtggacgacagagcgagactctgtctcaaaaaaaaaaaaaaaagaagttcaccttgattaacatacagcttctatctgtgaaagacaaatttgggagatttggttggaactctaagttgaaaacaaaaacttcatccatcactaatatctgaaacagaggtattcatctattcattcattcaccaaatgtttgttagtcattcaccatacatacactaagctttgtggaccacaaaggtctaagtcacatgaggctagaatgaggatggccatttttatttatagttaaacaaagaaaaggtaacaagaataaacagaaatttcataggaatttggaatctgactgagaaaatagttatttcagagataaaataaggaaaactgacttttgattactgccaatgtttgaaataagtaaaagtaaacaaaaaaatttgagtctgggtgctgaaagagtgatattgcagaatcaggaatttggttaaagaagtatgtttaagattgtttaaaaagtcattacttagattgagagcatactaaatttgagtattattaggcacacctccactttcctacagtagttcagacagactgtagaatatacttatattgcttaaaaaatgttttaaaattaatttgtaaacatgtagaagatcacttgtctagacctgcgaactttccaagtgcagatattccattggaatgctaataagggcatttgatcatcttttaaatcaccttaaaatttctgaaatatggagtgactccaagctctatgcattaaaaaaagaaagcacacttagaagtatattgtatccatccattgtgactatctttggctttgccattaatgttttacaatttggagaagtaacactattcaccaattcctggatctacagcccacccatggtcccagtttgtttataaagtagtcctcatgaaatagcaaagttattcagaaacatttaacatattttaaatataagataatttagagttcatattatcttgtaatgttcatacaatcatacagttcatacaatcttatgttattaatatccactacattcttcaagagttaccaatgtaatatgggtacttacaagcgcttgctcatgtacttaaaattagtagtaagttttactttcctaacatttagtagacagggtagagttcgtgtatgtccaattgcatgccaactcttatattgttcaattttccattttgatgttattctcatattgtgttacatcatcattacactatcttggttgagtaactcaaagggataaaataggaatggaaatcatataaacttaaaactcaggtttttttgtgaattgagactctaatgaaaaaacatcagaagaaccataaatctacatgtatttttaaaaagtaattctgtaagagtgaccatcttaggtaagcatcctaaaaataaatgtctaaataagaaatataagatgaatatctgaatattaaaacttattgaactgttgatctatttgtcttcttcagagaatgccattttgaaaatgtgtcaaaaagtaacataaggtcttttgggttctcgtaattttcacagaaaatagtcacaacttaggtaagtcagataagtctttgtcttagaaaaagtaaaaaacaatgctttaattcataaagtgaataagtggtttcacttaaaggcagaataaaaatcaatgcttcagaggtatcattaaaagtagtattcctcataagaaaacaaatatggttggcaaaaaagcaaaactagttattggcaatactttattatcagtgtatcagtatactttaatatcatgcaataacaattgcatgatattactagtaatcaaggaagaacaatttttatgtacatgttcatgccaggatctaattcaccttacaattggataaaacacttatgtgcaaagaatcaatcatttatctgtggcacttacatgaagattaattactgagcaactttttgttctgcttattactgacaacctatactgatgaagagtagatttttatgctaatattctattattttgtgagtcttggtatagactggaaaactatgtggggatcagacctagcagataacaattatatatatagaaggtaggtttgctattataattctttgtacctgaatgcctctccacacaaatttattcacaggaaataatatcctttctagttcttaattaattttggcgaaaattgttaaaattctcaaattccactctctaattgtttcatgaagaatgggcatttgcttttctacagtgaagaacaatgggtgatgaaatgttgctcacatggtttttataaagtatgtaatgaatttcattatgtcccggatagtgccaatcaaggtcatttttaaaatatgaaggcacttgttgaagtgacaagtcttagcctatcactttacggccaaatgatgaatctgtgtaatgttgaggataagacataagaatttcttcagaagatcatgtgatgttatgagtagtttgattgagaatgtgactaacgcctgccactaggtgattctcttcgtttgtcagaggaagaaaccaatgacttattcctggatatgttttaaattcagtgcaaatgctagaacagaacacaaagatagtcaaagctaaatgcaacccgaaagtagattatgatctatttactactgtctatcatgttgaacaatcaacttttcagcttctgagcatagtatgcaggcctatttaatgtgttagaatgttgaaattagtcttcagtgagaaatattttataatttcaaagatcatcttcaacctgaattcacagagctatgacagagctacatgccattataggtcctaattttctgtaactgtcaggtaagtttttctattttaagaaattaaaaggaaaggaaagaaggcaactagatatggacccagacatataagctatccttcttcaagcaaatacaaatatttcggtgaaacttttactgaaatatcaacactctcctatgtatgtgaaattcatattaacaattttaatattgtgtttaatttttactatttacaatatcgtgataacgggttgaatggcttgctgctgtgtgcactggaatgcctattgtcgggtctacataagcctgaagtttagaaaatactgtactagatttgatactccaataaggacaatagatatttcagttatcagtgaatactcagctggtagcatattgttggtgttcaaaaaatattagttgaataaattaatgaattaattacacttgccaaaaacttataagccagtttgctggtcttcagaaagagcgtcatgagtttttcctatcttaatatgttagttaatattttctattatctctgccatctttgtcttctgagaactctagaaagagaaatgtgcatcccatcactattgtcaaaatatgaaggatattgttattgttgttgttgtttaactagattttgttctttcagcttcacatggcacattaacataaacatgatttgtcagaggaaactgaattttcccacacactatttatctcattttacaacacttcaggctctaaaatacttgccagaaattgaagatgtctatttaatatctctaaggttgtttattgatgtaatttttgacatattttataacaatttctctccaaatgaccacatttatagtaaataactctgaacaccttaaccatgaatcttagtaacataagtgaaaacaacaggtagtatctgtacacacaggtaagacattgttaaagaaatatgtaaagtcaaacattaaactgcagaataacctaacgacattattttcttctaaggtaagctttctctttctctcctgctccttttccctttctcttcctccctcttctcttccctgtgtcccctgcttctctaatccacaaggcagtgttttgctcagtacatgtggctgatggccttttgtaacctcataacatagcaatctgatttcaagcttacattgtgaattatggtaaaagggttagcacagacaatgattttcttatttcttccccttattcaatctctctttttctctaaaaatatctctacctcaagaagaataaaaaacaaattcatagtaataatcctttcttggcaggcaacttattaccaaaattaaaggactttactttctatgtccatctcacttacagaaactgaatgaaagcagtagctcatcagaaggtagcactgtggacatcggcgcacctgtagaagaacagcccgtagtggaacctgaagaaactcttgaaccagaagcttgtttcactgaaggtaaagaaaagaatcctaatgttaatctttcatttggagtgcagcttgtttagctgttggtcagctaaaataaatcacatataataaaatggcactttgtaatagatataattcaatcacctctaatatgttgacagacaaaaaaacttaaagtctagtgtcatgctttgattatatctgcccaatatgtggaagagattaagaacatggaggaaaaatattttagtaccatcaaaacttctaacttatatttttaaagtaagtagtgatttcacaataagttggcatcttagacactactgaaaatgatcctacacagaatttgccttaaaagtaactttctgactgctaaaactaaacggattgctagtgctaaattgtgtttctttaatgaaaacatcagtttccaataattgttggatgaaatggggaataaatactgccctagaaactctatacctaaacagtcactagttgagcctggtgcagtatgggcaatagatagaagagatatgtttttcctacaactaatatttcctgtggtctgatatccctgggaatttgaggtttggaaatatgcatactttctatttgatgttattttttcataggcctagtataccttcagtcttcttctattccctatacaaatcatgcatatcacttaatgtccttttcaaaactgccctcatctgaccatggtggaacagcagcttgttcctctgaatggctgtaagaagtatttccatttaatttacccgataatatacattatcctatgaaaactctttctctttttgaacagttacatgttacttttctatcttttttctcttcttttcctccattccttcactccttagttccttctttcctccttcccttcttttcttcctccttttctccattcattccctttctcctttttcttcaaacatatcttttcctccttttttttttttttgccttggagcagggatcctgtatttatatctttttcttttttttttttttgaaaaccagattttttttggtaaggttcttgggagtaaggtacatgttcggtgcctttttgtgtgtgtacctaagtgcctttgtgcttacaatggtactcagaagtacctgttgattgcatttagactaagtgaaagcaatgtgtgaggaaggcaatgaaaagtcaaagccaaatcatacaaattagcttttagtgaactaaattaattatgcaaattacataagcccttctaggcacatcacaaaaaatcctaaatggtaacaaatgcagcattgttggaagagatctacatttttactctatatcctttataaaagggaagttttctgcttaacattattaatgtccaatttaaagttcttttctggagtgacttcaacagagtgcaacaggatgatatggtacaaggaaaagctacctcacatttatttgtaatttacaaagtttctcttggacaataacactgtgaggcagacaaagcaaatactgtccgctagggcatcatttaaagtggctgaatgtttccacaacttcacacagctgatgaatgtgctcttactactctaggcttagagagctatgctagcaagacagagatgagcatagtaataaaaagacaagacaaggacattgctaaaggatattatggaagcagagacactttatctacttttatttcaacactttctgcaggctgtgtacaaagattcaagtgttgtcaaatcaatgtggaagaaggcagaggaaaacaatggtggaacctgagaaggacgtgtttccgaatagttgaacataactggtttgagaccttcattgttttcatgattctccttagtagtggtgctctggtgagtgagattaagaaaaggtgatacagcactaatttttagaacactctaatactgatgacttattaatcctttgtttcattgtcttagtatccaatgcatttttaattatcccaccttgtatcttctatagatttactctataactctatatttctggattaacttttactatgtatgtaaatataattttaagaagctaatcattaatttttgcttactattaaatagcccagaaagtgtagcccttcagcttattcattaacaccaaaggatgtgaatattcaattactcattgtttaattaaaaaaagttattggaagccctgggatgggaatatatattctctgagttctgacgaattttgtttctaaatggtatttattattattatctcttgatggacagtagtaagtccttagggaccacttctctgtctttttccaattgtgtgctcactatttttgtgctacttaagaaataatgaaagttggtaacaataaatattgggcagcatgcccaagagattcatttaaggatgggtttatctttataacaaggtgttcacttcatcagaatcaatttatttttataggaaaattatttataaaactataaataaaacatacagatagcattttagggaaacactaacacaaaggaaataccatagatagaaaaagagaaagaaagagagagaaacagagtttgcctgattgaaatgcaagtgtgttacaagtttaactttttataattctaacacagacatatatttacctgtaatttttctgaagaaagaaatattttctacacgctactttagaagtctttcaccgttgaaaggaatgcatacttagaagtgaaacatcgagaggttcataatagaagaatatatattagaatctaaatgaaaagtaatttcatttaatcattgtcacactgtatgtctgttgagaaacataaattattaaaaaaataacaaacaacaacaaaaaagaagcagatgaacccaactatttagtcaaattggagactgcgaagatcaatcacaatttctgctttacaaaagcacaagctttcattatttcttcaacctcctttctatagcaaaaaaaaaaaaaaaaaaaaaaagccaatagaaggaagcaaaataaatgaaacaaaaggaatacataacttcaagttgggatggccacatcaggatacaacatcaagaactatttcctgactaagtcaaattaattcattggaatcatacttttctttttcttccaccaatagtctttcccctgattaaataagtaaaagacctttgcgaggaaaaaaaaaaagtaacagtaactactgtttctctgccctcctattccaatgaaatgtcatatgcatatgattaattttttaaatagcttatggagtataattatttttgaaagctaataatgtgtaacattttctttataggcatttgaagatatatatattgatcagcgaaagacgattaagacgatgttggaatatgctgacaaggttttcacttacattttcattctggaaatgcttctaaaatgggtggcatatggctatcaaacatatttcaccaatgcctggtgttggctggacttcttaattgttgatgtaggtatcgttcatatttttgtctctgttcaaggtagcttgtcttatttatattcaaattctacaatagtgagtctcagaccactatgttatgttgacagactataataaccactaaacgcatatatgcaatgagagtgtcatttctggaagacaagggctaatttaattctgatttaaaataacattgggggatggaatctatggtagttctctagttatctgagaaagctaaagaaaaaacaacacatcagcagtttgtagggaaagtagtgaaacagggaacttaaaaggtatgttgcttaaatcctttatgttgtgagtcagacagactcaagtttgtatcccaggaccatcacttgttgattttgtgccactgagttagtttcttggccccaaactcttgacccccaacttgtacagtattaaaggcactcaataaaaacagtgatgctgttgggtgctacagtcatttaaaaaaattctatttgatctactcaaactttttaaagagtagatttaaatagtagattatatggattatgacttcattataggaagtaaggtatgtagagtgtagggaaagagaagtctactttattcagcagtgaaagttttcctagaatgtaaactagatttacggcaagcccaaacagccctttatagaatttgtatccccaatgattaatactgcatttactgaaaacaagtgactgacttcaagatgtgttaaagttaagcatcatgttttctattatcaacttggcaaaatttcagctttagaaagctacagcaaaactatcctgatttcatattgagtagttttaccccaaaaagatactaacccagcaagactatgagggtttcttgtggaaagtgtttcttgagctaagaatcatgaatgcattatatttccttgaccctgaacaaaggcaaaactaagctatttaaaaaacttaacaatgttactgtgaaatgagccaattgagagaaatctcaaaggaagaattgctttatcacatcaataagggagaaagtttgtaatattgaggtttcaagcattagaagttacattatgtttcaatttcagaattgtttacactataatttaaatctaaatgtaatttaaccctttaaaacttcctgaggttttttttctattatgtttattacacatcagctttttcatgaaagttttttagtgtcatttttgaaacattttaagaaaataattttatagaaaattttgtagtttgtaacaataatatctttattttcaatgttctgttttaattctttaatgaagatcagtatagcactctataaaaggactaattacagcacatctcaaataatgtaagaagtatattaaatatgatacaattaatacattttaaaaaagaaaagtttacaaaaatagtgtgcagtatatgcggaattctccaatactagcatctttctaaccaaataagttataatcttccttgaatacaaagttttagtaaattccttatttagagaattagatacgtaagatttttcctttagtcatgtatattacctacaaatgaatacaaatgaagtaaatttattgctgtgtgtatttggtaaatattcattgattggccctttggggccagatatcatggcagaagccataaattagtataaaaaattttgaggaagttttgtaatggaatttctttctaagttacttatgtaaaaataaacaagtgaaaatgcaaggtattaccaagacaaaatatcaccttcaaaactgatgtagttcattaatttctgagaataccaattatgattagttgaatatactgatgcacagtagaaacttcctgctttttttagtacaacagcagtttttgtattttataactagctacaagaaaagccttaaattcaacagcaacttaataaaataaaggaagaatagccaatgaatttttttccaccttgatttcttcttttattttactaatttttactttgctttttttttctatttattcagttgataaattatatgacatttaaggattttttttcaactagcttttaattaatgtcctaaaaattacatcctttacatcaaactgaaattatttctttaattttttaaaggtttactgaaaatgtctgaacatttatcctctgaataattataagcaaaaattatacttgttgtattatatagcaactacacattgaatgatgattctgtttattaattgttattatttttgtgtgtgcaggtttcattggtcagtttaacagcaaatgccttgggttactcagaacttggagccatcaaatctctcaggacactaagagctctgagacctctaagagccttatctcgatttgaagggatgagggtaagaaaaatgaaagaacctgaagtattgtatatagccaaaattaaactaaattaaatttagaaaaaggaaaatctatgcatgcaaaaggaatggcaaattcttgcaaaattgctactttattgttttatctgttgcatatttacttctaggtgatatgcaagagaaataggcctctcttgaaatgatataatatcatttatctgctgtgcttatttaaatgactttatttcctaatccatcttgggagtttccttacaaatctatatacaaaaaaaagctgatgcattattaaagtactatgtgtaatgatataatggtaatctaaagtaaattctatatcaggtacttattctttgtgatgatatactgtacttaacgagttttcctgaaaataatgtgaatcacacatgtgcctaagtatgagtgttaagaaaaaaatgaaaggagttgttaaaacttttgtctgtataatgccaaagtttgcattatttgaatatattcaagattagatggttagatattaagtgttgactgaatttataaaactagtaatactaacttaaagattacatacaaatccacatcatttttataacaataaagtaaaacacttataatgaacagaaaatataattttgactcattactataggtaatttatacattaaccttaacttgcatcttattggtcagagtcacacaaaatgttattttatccttttcaaagatgcaataatcattttccatcatgcataacagattagaaattttgccattattgacttattttccatgcctttttttacggcatgaagcattagtttatagatatataatataaaaaattagttctgcttttttttaaaaaaaaatattatcaaaacaaaacactgaattgtgtgattccaatagaaaaacactgctctttcacctcctaaggtgtagttacttttatggaaactaagctgtattgtagacttccatttgcactttgtagattgtttatagccttatgttctcttctcaagtcttattataaatgtcactttgtaagaacgtaggacttgtcttcgatttccctaacatatatgaaaactttgtcctcattatcgacaactcagaacaatataatacaagtagtcctcttttatttctcacagagagcctcaaattttcaccaaaatgttaacagaaattatctctggggtgtataagaattaagtctgttttccaattaaatgtcactttgttttgtttcagactggcagtttcagttctggagaaaaaaaatgtcatttgtgtacattctacttgaaaacatgttgcctgaatcaaaataatatattttatatggcttgtgaaatctgaacaatgctaaacatttgaaaatattataaaccttttacatttgaccatttgaaagtttattaaattcattggtcaagtgctcagatatttccatacattacacttcatttctataaaaaagctgatcttatcggtatacttttaattttctcagaaataaccatatctataattattaatcaataatgccttttatattaaaagaggttagtttttgaaacttggagttttagacataaaatccttataaatgctgatagtgatataactaatagtttaaatggtcagatttatgaatatggctctattcctcataatgacaacatacacacagcactaaaatgactaatctcttcaatacgtgtttggcattgtagagtcaaaataacgttataattgattctattttttatacttctagtgtttggatattttattttgtaaaaatataatcatgaatgatggtgaggttggatataagaatgatgattatgattgggaagtgagatttgaacatgctcagaaactctcatttaattctttgccctagcagcataaaatcacaatagctgcgtcaaagcgtaactcaggcactcattttatttttgttgttctgttattttttcaaagcatgtgcttttatgcaacattactgaataaagcatgttgtacagtgcttgataagaagttagaaagtaacaaataaattatcatcacgttgcactttgtgttttgcatgttttatgcacatttctggctgacagcttttaaacatttattgtatttcaaatttccagtccaaatttttcaacttgtaaaattaaactgagtgaattgatgtcgtgaatatctagggtaaaataaaatttgtgtttaaatttgtatttttaatttcctaacctaggaaatcttaaataccttctttttcaaaagaactcaagtcttaatggatagggaaacagacggagagcatcatgaacaaaaagtaacaccaaatgttctgtcatatcagatttctaactaataacaaactatatatttctattttgtataggataatcttgctccaacttggatggggtggagcgctggttcctcccctgagccctttattatgggtactgtattaccccttttgctacctttaatccttgcactgtgacttatgtgtagtggggtgagggagggattgggaagggtactattattgcaccacagtagggaaaatacattatttacatcctaatcccctcttttcaattgtcttaaatttcatttgaaaaaaaaaaaaacctttatgaatttaccctctgtggattttaaccccaatggttgatatctttattaagtttcattgaatatgatttagttatgtgtatatggagttatccatctttggggagattactggattggtgagggcgggggaccctggtgtagaatgattatgtgaaaaaacaatttaacttgttaagctcatgatactgtttgaggcatacagcccctgctgtttagtacattggtctgggtcctgaaaattaccagttagataccatcagttgattattgatatgtatgagcagatactagggtgcaatatttcaggtttcataagactggtattgattgtgaccactctcattttttattgtgtaagttcatatggggttattttcaaaatgttaacaaggcaaaaatatattaagaaatagttgaataagcacatgtgaattgtgttgtaaacaaaaagttagaataaaaaaatccacttatttgaattatgcagaatagaatacatacctagaaataaaacaaaaacgtcttatcatgagtattaagataaaatttaaggcataaactcacttcttagaataagtaactcccaactaactttctaggattttaaaacataacacagtgaaaacatacataaacataactctacattttatttattcttaaagtttaagtgtattatacaagaagaagagtttatattcgagagacagaaaaagtcagaatttttgtttggatcaccaatatatcatagcttacaaaaaaactgtcttaattaaaacccacaacataatttttttagatttttaagaaagattctattattcttctttatacttaaaaatggatgattcctactttgcccacttttatttttattcacatagattttctttatttctattagagaagcactagaattcatgaatagtgttgatttgaagttcaaagtaattaattcagataaaaagacatttctgcatgtatgaaaatttctaatgtgaatttgcatatttaattatcaatccttcatttagtgtagacttatttttaaaaatgcaggtaatgaaccagaaatagaattggttgtgctagagtagagaaactttatttgatgattgttttgaaaaaaaagcttctgagaagaaacaacctctagtacagtattaattcattaagatagctcctttctcagacatttcctttcatgtagcctgaaagttcaatttgaaatttgttctttccaatttattcagactaattctgcctactttcttccccccataagaaccaattactgcagctttattgagactgaaaaaagttaatacacctccttctttgctgaaccaaggaatggcttggaactcttgggaaaagacaatcttttctatgatctttcattgtctaatttaatacatcataaatatgactatagctttgtataataaactccccaatactgtgccagatgttttctaagataaagttattttatgttcacaaaaaaaataaaacttttctctgggccaaatgtatgccaactttgcaaatcatatcctgaagtgcactgctgcagagtacatgcttgcgtcataaattccatagagttcgctttaactctaaatcaatccccagtttcaaagtaaacctctcaaacatattacctaagcacaaacttctccctgtgctcagttccttaattattctcatcccatattcagaaataacatttaaaaattatgctttgatcaataaatactaatctaaactttgcttcattaacccattcatttttgtcaaccattattttattcctatattcaaagctctctggtatgttcttatattcaagacactcaaggccctggaagattcacgaacatatgtttgcatcttaaatttttagaaaatcttacaatctgtcaggattacactgaactctagtacagagtaatatgggtaccagataagtgggagcaactcttccacgtagactggaaacagcactaaatgctatttataggctactttctgaacttaacttgttttaacctcatttttctcatatgccaaatgagaacgcaatactgaattatctgtacagttctgttcagtactagaattctgattcttgaattcaaaggggaaaacattcctctttattttggaggctaaactgggggacaaagttaggctccatgaaagaagtgctatttgaactaaagcctttaagaggggagagtatttcagaagaggagctattagacaaggaatttcaatgtaaatggcatctcaatcacctggcaattatattagcacacggttattatattaattgaagtggcatgaagtatagatgaccagggaagttaaaactggaaatatagattgtggagtgatgtgaataccaaggtaagaaaaatatttgttagttaccagagagccaataaataactttcaagtgggacttggggaagattaattcatcttacatagattaaatgaaggagaaggttaggagacagatgacagtgcaagtatgaaataacagagggcagttctaggtggtgactgtgagaatggaaaagaggtggcaaagctgagaaacgtttcaaagaaaaaatgtgagacaggtaatgtgaaaagaaaatcgagaaataggtatagataatcagtgttctgctcatactctaaattgggtgttgaaggcaaaatacgtattttaattagtactctgtgtatacacactagaaacagcattgtaatctggatagtggacaaaatattcagaaaagaagggaaatagtaacttgatttcaatttccaaatctctaatctgaaagaaatctaattctattcatccatttaaaataaattatataacgagaatttatgaagtccattgtattaatgcagacagtcagatgagataaggcaaagtgtcacgtgtcagcttggtagttgcatcggccacatcatttggttctgcctggataactcaaccaaattaatttttcatactcatcccctccacctttgtcattactggtattcttattttctttggcccacttatcacactgttttatgttccccagaaggcctagagttctttacaggctttaaacagggatcagaagtataagaaattggctcatgtatttttttttcagacaggcagttaaaaaaaattgttctaaaaatacactggcatcaaatggcaaatagaagatgttttgacgactacttccattggatcagactgacaagaataatacaagcacataggtggaattaaacttagctattaatgtccaagtttgaggcagctgccccttataagcattttagggtctgtttttagcttccctcttagccactcctgtgcagctccagtgggaggtatggaggaaaaagcaaggaagccatccctatgttgtttccaaacatgaacactcaagatttttaactagtggtccagaagtaaagagggggaaaacatccttctatagaaaaaaaaaaaagtagataataattgaacacagaacttcatgtgatcacatcagatttgagaactatgtatggcatccctctttttcttattttcctaagaaatgatttctattatgtttcatttgaaataagttttttgaattaaactcagtaaatgaaacaactgacatgactggagcttgaaataaacgatgtgatgatctaatgaaatacataatgcaaattgtcttgcttcttatgcaaaaattattagtcatagcaatgcatgaataattaaagacaattatattaggtatttaataatattttttatatttatcatctgaatttttaagttattttaaaaatatattggtcaaatcaactcaggtccaaatgttttagttttgttctttaatatattgcctttttaaaatgagttaaacttctgtataggctttttaacttttctttattctgataacacaattctgacttcatctggcagcaagttcctctgattttccttttcctttaaccttttaatgcttctccctcccttttttttaaaaacatttttgtttcatttcttggttatattgcctatagttgttttcctaagtgtattgcttaagaaaaaaaaatgaattttaagatttttttgaaccttgcttttacatatcctagaataaatagcattgatagaaaaaaagaatggaaagaccagagattactaggggaattttttttctttattaacagataagaattctgacttttctttttttccatttgtgtattaggtggttgtgaatgcccttttaggagcaattccatccatcatgaatgtgcttctggtttgtcttatattctggctaattttcagcatcatgggcgtaaatttgtttgctggcaaattctaccactgtattaacaccacaactggtgacaggtttgacatcgaagacgtgaataatcatactgattgcctaaaactaatagaaagaaatgagactgctcgatggaaaaatgtgaaagtaaactttgataatgtaggatttgggtatctctctttgcttcaagttgtaagtgaacactattttctctgaatatttttattgtttggaataataacaaaataatgacatacatctattatttagttcctaagaaaaagtatatatttctttctatttaaaaaatttcaatttgttagtacaagtttatgagcccagatgggtgaaaactttattacatgtaaggactgcagatatagtcagtagtgaccagaccaaacaaagacctctttgtcttttttcttgtattttctttgtttctatattgctctttctatataaacaagtaaattaataaatcagtaactttgccattttttattgtgattagaaggcttgtttccctgatcagctaccaaaacggaatacacttaacagatagatcatcttccaaaacacatacacttaatacacctaattggattgtaattaattggtagggattaactgctgctgagttctattatttggatcaaagtttggggaatgacatttaggttttagaattagaaccaggcatagcggtgggtgccactgcactccagcctgggcaacaaagagtgaaactccatctaaaaaaaaaaaaaaaaaaaaaaaaaaagagagagaattatacctggaagcaactagaaacaaaaatgaagcaaaagcagctgttgtcttatctcaaatgacctttcagcaccattatttaagtctattttgtcctaaatattaatgttttcactactgggtctctaagactgggtctccaagaaaaatagtttataatttatatttaaaaaaggtagccctttaaacattttcatttgattctgcttctagctgcagcagcaccacaacaaagcagggaataaaataagagtccagattatttgaaaactcagcttaaaaaaaaaagactgtacaatttctttcttcccttgtggttctacagtgtctttagggcagaaatcaatttttgctcaccaaggttatgatttcaactgttcaaccagaagactaactaagcaaacaaaccaacactggtcaaaacccttttgcagctcttccagaggtgtcaactatgattactttacaaattcttcccacctttttgttggaaattcttatttctcttcttaacatttttgatctactctgaataatattcatgcaattaaaatagagattttttaaatctggtaagaacgggtggggcatggtggctcatgcctgtaatcctagctctttgggaggccaaagctggaggattgcttgaggccaggagatctagaccagtggaggcaacatagtgagaccttgtctctaaagacaaataaaaacaaaagttaaaaaaaatctagcaagaatgctttctttaaaaattgtcgacacatgatgatatttatttgggcacttattctaacccttaactaatgaccatacttgtaaatatcactaaagcaaccacctcctccataaatttgaggaaagaaaaattaaaaattttaagcaatcctttaaaatgtaagcaattctgaaaatacagtgatggtcctgcacaaagctattaaataaattctgccaccaaaaaaaaaaaaaaccctctaaaatactgcttcacatttggcttttatagaatcacctctctattgattagtaagtcattgaaatggtcccttgaatcacttttttgtttctataccaagtgtgtaatggaattgttctatcattgacctaagccactgacatatttaacacatctctctctctttcatatacaaaagccttgtactttctagctaggaatcattactttcttttcactgctgtcacccacacccttgcttagcttttgtctcatgaaatccaccacctcacaagggttagcgttatcagaacaaagatatattgtgatacagacgctaaaggctttgctaacctccctcactagctaagggataatccttttaggcccacaggactcaaaattcatgccccaggacaagtaacaaattactgtaagttgttagcctgagtatccttcatcctgtgagtgccaagtgtctgctgtactattgttcacatttcttattcatattaacttattatcttcaagaatttcagaaagaaaatagaatagggggttatttctaaatgttttgatgcaaaattcttaaaaggattgtatttctaaatgttttgctccaaaattcttaaaaggatagttgcaaccctgcctttatgtatcctggtactatccttacattgttacaataaagagaaatcttaaattttcaatcactttgatcaccctgcagataaattttagcagatgatccttagatctaagttgtaattatttggctgatagagctattgacccatgtgttggcatttgtaagactttctaaaaagtgctccagcaaattttaatactgctttaaatatcatgacaccatgaactctaaagaattgaaaagtgcttgtgagttggttatcaaggggaggatatatcaaatggccattttgttcaatatgtgttctagaaatgaaaagccatactaaaatactgtcttggtccaaaatctgtgtaaaatttgttttgaaatgtctttcaaaaatattcccttttgaaaattatatcagtaagaatatttattaaacatcaggtctaaattatttttactccaaagtaaaacatgcatgtccttcttaataggccacattcaaaggatggatggatataatgtatgcagcagttgattccagaaatgtaagtattccttgtattctaagtctttttacaatattgatcaggtggtaaaattaatcgaataaagcataaacgaccaaatgaaatgattctatcttgatttaaaatatttgggaaaaagtgtgacaggtaaatattcaagcatagcaatgtttatcagaaagatcttactaagataattcaacacatgaattattttgaaaaccaaagtaacaaattcatgtatttagtaactaacaaatattttccttttaaatattttctattttgtttcctatttatccacacattatataattagtagtaattttagtgtgcgggaccaaatttgaagaaatatatgatttctatcattagttgaaatgtatagtcaccctccatattagacagcatgaaaagttatggatattgttctgtcagccttagattactgtgatgatttctttcaaataatcctattttaaaccatataaaagaatgtttttatatgatttttgcattcataaattgactggagcctttactaatgttgcaatcacttctgtgaccaacagattcctttaagtgtatatcaccaaaatataaacctattttatttgatttcagcctctttcaggctccaagacctaaactgaaattcatgctcattccaactttgctcttcaaaactttgtaagatgtagtattttctatcaaccttcatctttctattctcaagtcccatctgtttagtttatcatcataaagaataacctctgtccctgcagtcttcaacctgatagagtttgatgttatctttcttgaagtgcatttcaaatagctttagttttatgttgaatatcattttgataacctccagagttgttttatttcactttgtcacttatattttgttttgtgtgtttagttggtttttaactttgttgcttttagaaggacatgaatctgttaaaaaactatagtgacctttcagtccattactaaattataagtaatagcccatttgttttaagcacaatctaggaattaaataatcaactgaggatttataaaatggactgtccatctatgtctacttaatctgaaaaattcaataactgttactttagggtaaagtgccaaacatctgaatgaacaactcatttcttatttgctacattatttcatgcatacatgaatgactgtttctaaacctagcctgtagatatttacagttttaaattttttattaataattttaaaattactaaaattcagtaccttaaaagcttgcaaatttagcacattactgttcaaatggaagaatattatttgtatttatagttataaaaatagattttagaatgtcataatagccatatttttcacatgaaaacatccctaaaggccaatttcagggatgttttttagaggtagttgattcagaaaaaaaaaaaatgctgacatattagtaagaataattttttctattgttatgaaaaagcaccagtgacatttccagcactaaaatgtatggtaatattttacaaaatattcccctttggtaggtggaactccagcctaagtatgaagaaagtctgtacatgtatctttactttgttattttcatcatctttgggtccttcttcaccttgaacctgtttattggtgtcatcatagataatttcaaccagcagaaaaagaagataagtatttctaatattttctctcccactgagatagaaaattattccttggagtgttttctctgccaaatgagtacttgaatttagaaacaaaatgggagtatatattataactgatttttccttcctcttcctctgtcattcactatccatatatttccggctatagaaagctaagaataactgtgttccacactcttgttcataggttcataaagtttttcctcctcttattcattatcaagaaacattttctatcttttaaaaaataataattagaataaaactagaaagcaaccgaatatgcctctttcccaaaagcaatttgttactttatccctacaactacccactcccccttgaaaatatattttccaactaattctttgcaataaattaggcactggatgtaagcttcttctagtgtttatttttacgcttttttctgtcattgatttcttttatatattcccatttctttctccaagatatttaaatacaagctatccgtttcagtcttgaattgtatgactattatttatcatttataaggctcatttgattgtcccaattacctatgtacattatagaacatatggaaagtaaataaatatcatcacttggaagtaactgctgccattcacattttgttttctgttcagagtatttctgcacatactcttattgttgtactttttatctataattataaattccactttagacttaacataagtattttctcattttgttaagtcttcatatatgcattatcataatttacttattcattccccagtaggttgataatttagattgtttttaatctttaatgatttaaatagtaccttgttgaaagttttgtacaaaaaaaaagagagagggacagaaaataaggctttaattatttcctgagaataaattcccacaatgaagtattttactcccctagagtaatataactactcaaactcccaatatcagtgtatgaacacccatgccaccgttccctcactgtcaccaaacattctgtttttgaatatttgatatttaataggtgaaaactgtatttaattttaatttttatgacttttataaccttaattgttatgacttttatgtattttattacatttgaacatgttcttaaatgctcattggccatttgtatttcttcctttatgtactgttgcttcatctcacttgttcagtaggtttgctttttgtataatgaatgagtgctttcttagactacagaacattctcccctcaattcccttttcttattaccagtagtattcttaagtcaatatcaggctactctatttcacttacttgccagtgttccaatcttctatccctactggtctgtcccatacttactatgctatgagctctgatttatcccctaaatctctcactaactcatccagttttctttttatccctttcctccaattcttgacagagttagagtgacttttttaatgagtaactccaaactgtcttgcagtatacatcctctaactctttgctacatttaaataagaaaattattgcctttaacatcataaaggtagtatgtatagtataaggtaccaagtatttattatctcagtgaaccaaatttcgccactcactaagcataaggtcttgggtaaaatacttaacctttttgagatttgggggtgtttgtcttcataagataataataataaagtcaattttgaattatttagggaattaaatattatcatacctaaagagtacaattttttttacattttaaatcccagatataattatactaatcagttgaattttgtatttctttttttagccatccattttctattttaacattgaaaaaaatgtacaaaaggacacagttttaaccagtttgatttttcttttctatactttggaggtcaagacatctttatgacagaagaacagaagaaatactataatgcaatgaaaaaattaggatcgaaaaaaccgcaaaagcctatacctcgaccaggagtaagaagtatcaaatgatatgggggaaaaatacaaaaacaaaaacttgcatgcttgtctcacaaaaaagaaagtagctaacatttccagtagaaaaaatttctttcacttgtagagcatcatctaaaagtgatgtttgtatcttttatgataatggtaacaacaaaaaaaattaaagaccaaaaaagaacaagaagaaatagaagatacacccttgacttcaagagatttagaagcaccccattacaatccatattaattggccaatggacacatagacaatgtgatgtgcacaagagaaagttaatcacacaactcaagaatggttgccaagtaatatcagggaaagaagtaaaccttgggatggggctgtaagaaatgcaatttcctaatattttaagaaatgaagtgttgagtgaaataacaccttacttctattttatttttcactagagatactaagtgttttaaaggaggaaagaattccagtatctactattcatatgtatggctatagagttaggtattactaatgtctgcagaagtcagggtcagtaattacagtttatgatgataaataacaatactcatgcttccatgatgaaataaacaaattgctatgaaaatgtacagctattatcccacactataaatatttttatgatgatgatctgagaggtttcagtaattcctagggtgcatcaaggaaaaaactactagcaaatattcatattgtgatgattgaatattgccttcctgagaatgatgagaaatatatactttctccattaaaatttagcactaagagtagaaatgaaacaacaatttaggaaaaatataagttggaaaattccctcagaattcctcagtggcccaaagaaataagcctgcagatggccttcagtgactagcagtggcagaaatgggaagcagaatcacagatcaacgacaaagaacgtgaagttttttttgacataaacatataggaaatgtcattctggtctcattatccttgtgcagtttcaggattctgtgtctgacaatgttagccaaggctatttggtagaagaatatgagtattgccatatgtggtatttaaatgcataatgttatagatgtgtcttggaaattccaaattctccttaacaattatttgagaatacaacaagtgaaatattaatagtactatattttaaaatggatgtatggtccagctgatcattggaaagtcttgaaaaaaaaattaaatgggtttcttaccttttcataatcttaaaatgttgatatgtgttgcatacctctggaagaagtatacagtgttgaatgtttcttttgtttgtttgtttgtttgtttgtttgtttttatcagaaaccttctttggataagggattgttattctgagaaatacacattagtaaatggcaatttaaataactaaattttaacaattaatatgctataaatcattcttacaaaaatcagggccaatgactactttgcaagaaactagaaagtcaattaatgcagaaagtacttaatgctaatgcacatgagaaaactcctttgttgttaaaagcatttctatttctctacagaacaaatttcaaggaatggtctttgacttcgtaaccagacaagtttttgacataagcatcatgattctcatctgtcttaacatggtcacaatgatggtggaaacagatgaccagagtgaatatgtgactaccattttgtcacgcatcaatctggtgttcattgtgctatttactggagagtgtgtactgaaactcatctctctacgccattattattttaccattggatggaatatttttgattttgtggttgtcattctctccattgtaggtaagaaatatttaaagttcttaaattcagttaaataaaagtgaaagctgaaacaatcaagattagattcaagatcatcccagcaatcagagataatcactgtaaatattttgatacattttatccaagtgtgtttgtttttttaacaaaatgtctcctactatatgtcagtattgtttcttattctatccatttagaacaatatacttagtgtaaatgtagtaaaacctcattcatttgaactagaactgtgctattaactaaaataaaaatgtttttgacatgttgagattgaagaaccaatatagtatctagatggttctgttaacaagactagaaatgtagtctggtactcacgaaaattgctttagagaatagacatggagtcaccagcatatagatattagtggaaagtggtttcaagataaggaaaagtattgcataaaaagagaataaagacaaggactaaacattagcaaatgcatatagtaggttctctgcaagtgtcatgtagagattttctagactaccttaaaaatgggtttatcataatgatgcacaagggaaataaggtggcatgggacatcatcagtactatacttcaaagcctggaacacataactagcctcatgagcaatagctcatttcattagacaaaactaaagctctagtaaagtaaaaagcatctgtctgtgggcctattcattcttccctaaacaggatgatatgattgggtcaatattttactatccaaaacgaggcacctgtgttggacagattttcatgccactcccctctctgaagaaactggccttatatccagctcattgtatatagcctttgattcccactaattataatccttggttataactagtgtggctaaggtataaaagttgtattctcacacgtctccttctctctctctctctctcacacacacacacacacacacacacacacactcttacacttcgtcttttcagaatgaggcatttaaacttgaaggcatttagtttcttgagctcttctttttaactttacaagtattgtttttatctaaaaagcaaatggagagagaagctgaaaataagaagactgagattacagtgttaggtacaggagaccaaaaagaattgaaatacaacattaagtacaggatactaaaaagagcatcaacctgggatcctttcagaaatgcaccagaacatacataaatgagtatataaaaatattagagtggaatttaagtaagtaccaagatcatggggagatgaaagtagcatcaaaagctaccaatactttcagatggaaaaggagtaaatagagaatttagaatatggcaatttcagaaaaagtcactgtatacatataaacttgtacctatactgttgggctgctactgttcggccaaatgtgcatttttaacttattttctttttaaattctgacttgggactttacataaactaaaagtagtttataaacatctcttaaagataaaaaaaagtactataatccttataattgaaattattgctgaatttcaaaattaagatttataatatattatgtacaattatatatatattatatatagttgtcatatttaatataactgggttcaggactctgaaccttaccttggagctttagaagaaacatatgtttattttaacgcatgatttcttcactggttggtattctcattgtttattcataggtatgtttcttgccgagctgatagaaaagtatttcgtgtcccctaccctgttccgagtgatccgtcttgctaggattggccgaatcctacgtctgatcaaaggagcaaaggggatccgcacgctgctctttgctttgatgatgtcccttcctgcgttgtttaacatcggcctcctactcttcctagtcatgttcatctacgccatctttgggatgtccaactttgcctatgttaagagggaagttgggatcgatgacatgttcaactttgagacctttggcaacagcatgatctgcctattccaaattacaacctctgctggctgggatggattgctagcacccattctcaacagtaagccacccgactgtgaccctaataaagttaaccctggaagctcagttaagggagactgtgggaacccatctgttggaattttcttttttgtcagttacatcatcatatccttcctggttgtggtgaacatgtacatcgcggtcatcctggagaacttcagtgttgctactgaagaaagtgcagagcctctgagtgaggatgactttgagatgttctatgaggtttgggagaagtttgatcccgatgcaactcagttcatggaatttgaaaaattatctcagtttgcagctgcgcttgaaccgcctctcaatctgccacaaccaaacaaactccagctcattgccatggatttgcccatggtgagtggtgaccggatccactgtcttgatatcttatttgcttttacaaagcgggttctaggagagagtggagagatggatgctctacgaatacagatggaagagcgattcatggcttccaatccttccaaggtctcctatcagccaatcactactactttaaaacgaaaacaagaggaagtatctgctgtcattattcagcgtgcttacagacgccaccttttaaagcgaactgtaaaacaagcttcctttacgtacaataaaaacaaaatcaaaggtggggctaatcttcttataaaagaagacatgataattgacagaataaatgaaaactctattacagaaaaaactgatctgaccatgtccactgcagcttgtccaccttcctatgaccgggtgacaaagccaattgtggaaaaacatgagcaagaaggcaaagatgaaaaagccaaagggaaataaatgaaaataaataaaaataattgggtgacaaattgtttacagcctgtgaaggtgatgtatttttatcaacaggactcctttaggaggtcaatgccaaactgactgtttttacacaaatctccttaaggtcagtgcctacaataagacagtgaccccttgtcagcaaactgtgactctgtgtaaaggggagatgaccttgacaggaggttactgttctcactaccagctgacactgctgaagataagatgcacaatggctagtcagactgtagggaccagtttcaaggggtgcaaacctgtgattttggggttgtttaacatgaaacactttagtgtagtaattgtatccactgtttgcatttcaactgccacatttgtcacatttttatggaatctgttagtggattcatctttttgttaatccatgtgtttattatatgtgactatttttgtaaacgaagtttctgttgagaaataggctaaggacctctataacaggtatgccacctggggggtatggcaaccacatggccctcccagctacacaaagtcgtggtttgcatgagggcatgctgcacttagagatcatgcatgagaaaaagtcacaagaaaaacaaattcttaaatttcaccatatttctgggaggggtaattgggtgataagtggaggtgctttgttgatcttgttttgcgaaatccagcccctagaccaagtagattatttgtgggtaggccagtaaatcttagcaggtgcaaacttcattcaaatgtttggagtcataaatgttatgtttctttttgttgtattaaaaaaaaaacctgaatagtgaatattgcccctcaccctccaccgccagaagactgaattgaccaaaattactctttataaatttctgctttttcctgcactttgtttagccatcttcggctctcagcaaggttgacactgtatatgttaatgaaatgctatttattatgtaaatagtcattttaccctgtggtgcacgtttgagcaaacaaataatgacctaagcacagtatttattgcatcaaatatgtaccacaagaaatgtagagtgcaagctttacacaggtaataaaatgtattctgtaccatttatagatagtttggatgctatcaatgcatgtttatattaccatgctgctgtatctggtttctctcactgctcagaatctcatttatgagaaaccatatgtcagtggtaaagtcaaggaaattgttcaacagatctcatttatttaagtcattaagcaatagtttgcagcactttaacagctttttggttatttttacattttaagtggataacatatggtatatagccagactgtacagacatgtttaaaaaaacacactgcttaacctattaaatatgtgtttagaattttataagcaaatataaatactgtaaaaagtcactttattttatttttcagcattatgtacataaatatgaagaggaaattatcttcaggttgatatcacaatcacttttcttactttctgtccatagtactttttcatgaaagaaatttgctaaataagacatgaaaacaagactgggtagttgtagatttctgctttttaaattacatttgctaattttagattatttcacaattttaaggagcaaaataggttcacgattcatatccaaattatgctttgcaattggaaaagggtttaaaattttatttatatttctggtagtacctgcactaactgaattgaaggtagtgcttatgttatttttgttctttttttctgacttcggtttatgttttcatttctttggagtaatgctgctctagattgttctaaatagaatgtgggcttcataatttttttttccacaaaaacagagtagtcaacttatatagtcaattacatcaggacattttgtgtttcttacagaagcaaaccataggctcctcttttccttaaaactacttagataaactgtattcgtgaactgcatgctggaaaatgctactattatgctaaataatgctaaccaacatttaaaatgtgcaaaactaataaagattacattttttattttattgtttgcccagtcactttttgttaacagaatattctaatgatatggagattttttacattacaaattgggggagaaggggagcgcgcgcgcacacacacacacacacacacacacacacacacacacacagaggcatacccacgttgacaacaaaacctagggtagatatgtcactggaggtagggggtaatgacctcccagaattacaagcagcaggtgtgttctctgttaggaggaagaactggtgtcagaggatagctagtgattctaggaggaagagaagtatggaagccagagtgatggtggatgaccccttgagctatgaaaagaaacccttaaatcatcatttaaaaatttagaattgccatgtgtgtaggatactgtgtttgctcctccagagccactctctctgcttctgcatcattctgtgtgtcccagaagggtgacttctacacattgcaaaaatgggctctcctacctttgagctcccaattggtttggccaatgagaagcaccagtgggaaagcaccagagagagaagattgacataggaatatttcttctccaattccttctttgctgggttggcactggactcattcctccccgaaaagtcatactccaatcagactgcccctcatacaactgaagctactttctctggggtcaggtaatcactcctccccttgctccttcaggtctgctgctgcattgagagtgcttttgtattccttgtagctttctcctaacattgctgacacttttgtaaatgtccccttcatgaaattcttctatatgcctcatttcagcatgccatctgtctcctgcctggctgacacaaggtgattcaacagctcatgaaagtcagcaggaagcaaagatgtgccttgcttcagcttggggtcttaatcttgctaacttttgcagataaagaaaaacagtaactgggggaaccacagtgaagtccagtgcagaattcacagatatcatggaaaggttactcgggtggtccagatagtaaaattaacagtctaaattaatctatctaaatttctgaggaacgagaagccttcccttgtcatcaggtgaagccagaagagggaatatagcctcaaccagaaaagggacagtaattaaaaggcttttcccatccttgtacaatggactgactttgcctcttcataacatcacaatcctaaagcaacacaacaattaattctgatatattagtagctgaaaaaaattcccatttccaactaaggtaggtcagaattataggataaaccctgcagactttttatactacccatccacgccattactcactgttacctttccaaatacaaagagaagaactggtaaaacataatcatataaatctccatattcattttgaaatatttggcatgatattttctgtgctaaaaagtaattattcttcaaagaatgatgaggtcatgtcagtaagacacaggaaccaactagaaggggcttcccactggccaaatctggggcaagttgagcatcaaaataaatgatagtaaaagattataattcattgaataagaatcagcaaatacatactgatgtaagtaaataaggaaaagtacaaatctgtttcttgcagttgaatgttaattaacaattgtagaagaaataacggagttagaaaaatcactatttggcaatcaccctaatgacaattgattcatacaagaatcatcaatgagtattaaaactcatgggtgaaagtttgatgaggaatagggtatttatagcatcttaaagtatctcttctctattaagtagaaaatttaaacagaagaaagtatactttggagaaatacagcagacaataccttcaaagatatcatcaattatgagaccaactgatactatgtgcctcctgataagatatactgaaagggccacattacttcttggtacacagtcaaaattttaaaaccagaatctaactacaaggaaaatcaaattgaggacactctataaaataagtggactgaactccttaaaaatgtcaatgtcatgaaagacaaagaaaggctaaagaattccatgaggtcaaagaactatgacaactaaacacaattctggatggaatatcaaattaaaaaataacagataaataatattattgggaaagttgaataaatttgaatatggactgtttattagttattagtattataatagtgttaattttcctaattttgttaagactagtgtgcctgttccatgaaaatagaaaatgttcttattctctgaaaatgcatgctaaagtatttaggggtgaatgcaacaatgtctgcagctcattcttgaatcagttcaaagaaaaatgagttacatttatatatatatgtatgtatgtaaacagacatagataaaagtatagatgtgtgtgtgtctttagaaaggggaggattttttttttttttttgctgtgtgttactgaagtgcctatgtctgcgtgttcacactatcatattttgtatgccctggactttataatttctaccttcaaaattagatctactgttggtaattaattcaatatatactggttttttaactactattctcatttcctagcagtaatcttcctgaaaagtcacagaaatgattacattccttgttcttcataataatcactgtttaattaaaataagaatattttagaaaagatctgcggcatagtggttaagaccccagtatttgatgctaaacagatctgatttggataacagaaggtggcactttgctgtttaagctggggaccagacactgtgggtataaatagtaattccaaacacagctccacagagcagcacccttatgacaaggttttcatatgtctatagttaagccagaaaattaagaataatgccataaatatttataaagctgaacatatccaagttaaagacctttatcctgaaattgtatcttttagattattttctaaagactaataccatttaatgtttaaatgttctttggaaatgatggtgagaatacgtgataatgggtcattggttttaatattttatttagccaagtggaaaattggcaacctggtgtcggtcctcccatttgtattttactggtgcatgaaatccaaaagtctagtaaccattgggacagacaactctactgcataagtttgtatgtttgtatatctgtatcacaaagcccagacactcgaactatataaacttgtcgcactaaagacagcaaatatgtctggtaattgcatattcttcatgtgtgcactggaatttcttattatataagaaaataaatgtgtttctaaaccaccatgaattgggtactgctgatagtactattcttcctggcacatggaaatatcccactgaggttgtcaatcaatattgatttaatcagtgtggcagcaaaggcactagaggaggaaaatactctagacaatcaagtatagatgggaaaattgcatcaccaagaaattcttaaaatcacaagtggataatttgcaatatcaattgattttactcaactgcttgagtcctttatcattccgttagaacactcctcatatttgcagataactcagcccctcacctcagcaacaagcaagaggacatcattataaacttcctcaatttctttcctatccagtgaaaaatatctaagtcccttttcccttcccttttccttcccttcccttcctttttctttccttccattctcttcctttttccttcctttttctttccttccattctcttcctttttccttcctttttcttactttacctccccctcctacctttccctttctcccttcctccctctctcccttccttcctctctccctctccttccttccttccttcaatccatacttttatatcttttcagagatcaatttttcccattcatttctacattctcagataccttgctccatgacttgttctacttctcttctatctttattctttccctcttgactgatcctttttgtctgcctttgcattttcaaaatcagtttttctaatcttaaaaaataactttgctcaaccctgatgcatctttattcactgtgtcattatctcattatttttaaaggttagtttctaaagccagggctctatactcactaccttcactcttggttaaaattaaaagaaatataggtcccagtgatatttatgggaaaatttgactgtgaataatcttgttgatataaacactttgggttttcaaaatgttatgctagctgttaactttcccagtaacattatgagggaagggctggaaaatacaaaaggtagacataggaaccgagaacaccacccctatggagccaagctatacatactctgtctctggttatcataaatacatctcctatattcaatgcttgcttagaaaggcatgatgtccacggagcaattcaattgttcactgtgatgggtttttttgttttctcctcatggaatgcaacttttatttatgagaatatggagaccagaaagtccctaaaataaatttgtaaaaaaaaaaatttaaggataaattcatcatgaaaaaagtattgttatagaaagtttaatttttcccctaagttgttatgaactgactacccctgtgttaattaaacttgccattatgcatgtgtatattttgttggaaaccattgagatacaagtcttatttttcttcttcaagctgtttgaaataaattgtgactcaaacaaattcaaataccagcccaatgctgaatcttattcttccagagcaccttctctctctccttcatggtctcaaacctggctcctacttttaccactctaaattagctaaatttgatctttattcaggcttcatcgtatctggcagatttttagaattcagtgatgatgatgatcatcacctcctccctctttaaattgcatcttactgtgtcttccataaaactagagtaccctaggcctcttagtgtatctttgattctttttcttttctttctttctttcttcttttttgtgttgttgttgttgttgagatgtagtctcactctgtcgccaggcagtggcacaacctcctctcactgcgacctccacctccctggttcaagcgattcccctgcctcagcctcctgagtagctgggactacaggttcacgccaccacacccagctaattttttgtattttttaatagaaacggggtttcaccattttggccaggatggtctcgatctcctgacctcgtgatccacccgccccgcctcccaaagtactgggattacaggcgttaagtcaccgcgcctggcctgtatctttgattctttgcctttactctctatcaatattttctctccttttagatttgtagtgcagcagcagcctttttgctgagttggtgctgcatctccacacgtctgttggacttttgtacttgcatattcagctatcaccttcaacttaatatgtccaaaactagtccctttatagtctatccctatcagccatcaacaaaactagccagaagtcaaccagctttccccatatctgttattgttcaagttatctttctaattcggcaaaagaaataagtacaattacaggatatattgaagaacaaatgagtaatgctatgtgaggatacagggaaaggttatataataggaaaacttttttttttttttctttgaaacagagtttccctctgtcacccaggctggagtgcagtggcgcaatctcgggtcactgcagcttccactccccgggttcaagcgattctcctgcctcagtctcccaagtagctgggattacaggcacccaccaccacacctggccaatttttgtgtttttggtggagacggggtttcaccatgttggccgggctggcctcgaactcctgacctcaagtaatccacccgccttggccccccaaagtgctgggattacaggcataagccaccacgccgagcctataatgggataacttctgatctgggttttgaagaataagcggggtagggcagccaggacagcaaaaatatcagaccaatggccaaaaccacaggctctagagtcagattgcctggatccaaatatcagctatactgatattacaaaagtttcttggcctctcattgcctcaatttcatcatctgtaaaaatggtaataataattcttatgaggactaaatgagttaacggaagtaaagctttcagatcaacagttccaggcatataattactacataagtctttgttttaatgatgacaattaaagacacatatgaaaatgagaaacacaaggacagttcagagcatttttaagagttcactgttgctaatgtgaaaaaggagcaatgacagtgactgagagacaagcaggactcagatgataaagggctttaaatgcagggtgggggccttggtgatgaagacccatttagaaattgtaaaagaagcaaaagtcggtgagagtagattttgacttcaagacaaaggaaacattcaatgtgaattttataattgttttgtctaattctaggaaaaatgacattggtaaaaaagcaataaatgttggtgaggtacagtgaaaaggaaaggcttatacactgttggtgggaaagtaaattagcacaatttatgtactatttatgtaccatttatgtttcctctttggaaaacagtatggagatttctcaaagaactaaaagagatctaacattctatctagcaatccccctactgggtatctacttaaaggaaaataagttattatatcaaaaagacacctgtatttgtaggtttatcacagcccagttcacaattgcaaagatatggaatctacataagtgtccatcaactgaagagtggataaagaaaatcaggggtgtccaaggtagacaatacagtcatgggttcttagtttctatttctgtttgggtcagtaaagccccttgctcatctcccttttctgcttatcactagggacagaaactaaaagtcatggcttcaggctgctaaagtctaaaacaaaacaaaacagaacaacaagaacaataaagttaggcgggacaagcttgaagactgaacagtagttatttatggcagaatactactcagccataaaaat

SEQ ID NO: 3 - RNA, 8612 nt, Homo sapiens
  source 1..8612: mol_type = mRNA
ttgctgatttgtattaggtaccatagagtgaggcgaggatgaagccgagaggatactgcagaggtctctggtgcatgtgtgtatgtgtgcgtttgtgtgtgtttgtgtgtctgtgtgttctgccccagtgagactgcagcccttgtaaatactttgacaccttttgcaagaaggaatctgaacaattgcaactgaaggcacattgttatcatctcgtctttgggtgatgctgttcctcactgcagatggataattttccttttaatcagaacagcataagaattatttctgagtggaggtgaggcttgtccaaatgtctttgctatcatggatttcctgactcctacctgtttgaggtttgggcaattatgaataaggctgctgtatacatccgtgtgcaggattttgtgtggacataagttttcaactcctttggttaaatcctaaggaatttcatatgcagaataaatggtaattaaaatgtgcaggatgacaagatggagcaaacagtgcttgtaccaccaggacctgacagcttcaacttcttcaccagagaatctcttgcggctattgaaagacgcattgcagaagaaaaggcaaagaatcccaaaccagacaaaaaagatgacgacgaaaatggcccaaagccaaatagtgacttggaagctggaaagaaccttccatttatttatggagacattcctccagagatggtgtcagagcccctggaggacctggacccctactatatcaataagaaaacttttatagtattgaataaagggaaggccatcttccggttcagtgccacctctgccctgtacattttaactcccttcaatcctcttaggaaaatagctattaagattttggtacattcattattcagcatgctaattatgtgcactattttgacaaactgtgtgtttatgacaatgagtaaccctcctgattggacaaagaatgtagaatacaccttcacaggaatatatacttttgaatcacttataaaaattattgcaaggggattctgtttagaagattttactttccttcgggatccatggaactggctcgatttcactgtcattacatttgcgtacgtcacagagtttgtggacctgggcaatgtctcggcattgagaacattcagagttctccgagcattgaagacgatttcagtcattccaggcctgaaaaccattgtgggagccctgatccagtctgtgaagaagctctcagatgtaatgatcctgactgtgttctgtctgagcgtatttgctctaattgggctgcagctgttcatgggcaacctgaggaataaatgtatacaatggcctcccaccaatgcttccttggaggaacatagtatagaaaagaatataactgtgaattataatggtacacttataaatgaaactgtctttgagtttgactggaagtcatatattcaagattcaagatatcattatttcctggagggttttttagatgcactactatgtggaaatagctctgatgcaggccaatgtccagagggatatatgtgtgtgaaagctggtagaaatcccaattatggctacacaagctttgataccttcagttgggcttttttgtccttgtttcgactaatgactcaggacttctgggaaaatctttatcaactgacattacgtgctgctgggaaaacgtacatgatattttttgtattggtcattttcttgggctcattctacctaataaatttgatcctggctgtggtggccatggcctacgaggaacagaatcaggccaccttggaagaagcagaacagaaagaggccgaatttcagcagatgattgaacagcttaaaaagcaacaggaggcagctcagcaggcagcaacggcaactgcctcagaacattccagagagcccagtgcagcaggcaggctctcagacagctcatctgaagcctctaagttgagttccaagagtgctaaggaaagaagaaatcggaggaagaaaagaaaacagaaagagcagtctggtggggaagagaaagatgaggatgaattccaaaaatctgaatctgaggacagcatcaggaggaaaggttttcgcttctccattgaagggaaccgattgacatatgaaaagaggtactcctccccacaccagtctttgttgagcatccgtggctccctattttcaccaaggcgaaatagcagaacaagccttttcagctttagagggcgagcaaaggatgtgggatctgagaacgacttcgcagatgatgagcacagcacctttgaggataacgagagccgtagagattccttgtttgtgccccgacgacacggagagagacgcaacagcaacctgagtcagaccagtaggtcatcccggatgctggcagtgtttccagcgaatgggaagatgcacagcactgtggattgcaatggtgtggtttccttggttggtggaccttcagttcctacatcgcctgttggacagcttctgccagaggtgataatagataagccagctactgatgacaatggaacaaccactgaaactgaaatgagaaagagaaggtcaagttctttccacgtttccatggactttctagaagatccttcccaaaggcaacgagcaatgagtatagccagcattctaacaaatacagtagaagaacttgaagaatccaggcagaaatgcccaccctgttggtataaattttccaacatattcttaatctgggactgttctccatattggttaaaagtgaaacatgttgtcaacctggttgtgatggacccatttgttgacctggccatcaccatctgtattgtcttaaatactcttttcatggccatggagcactatccaatgacggaccatttcaataatgtgcttacagtaggaaacttggttttcactgggatctttacagcagaaatgtttctgaaaattattgccatggatccttactattatttccaagaaggctggaatatctttgacggttttattgtgacgcttagcctggtagaacttggactcgccaatgtggaaggattatctgttctccgttcatttcgattgctgcgagttttcaagttggcaaaatcttggccaacgttaaatatgctaataaagatcatcggcaattccgtgggggctctgggaaatttaaccctcgtcttggccatcatcgtcttcatttttgccgtggtcggcatgcagctctttggtaaaagctacaaagattgtgtctgcaagatcgccagtgattgtcaactcccacgctggcacatgaatgacttcttccactccttcctgattgtgttccgcgtgctgtgtggggagtggatagagaccatgtgggactgtatggaggttgctggtcaagccatgtgccttactgtcttcatgatggtcatggtgattggaaacctagtggtcctgaatctctttctggccttgcttctgagctcatttagtgcagacaaccttgcagccactgatgatgataatgaaatgaataatctccaaattgctgtggataggatgcacaaaggagtagcttatgtgaaaagaaaaatatatgaatttattcaacagtccttcattaggaaacaaaagattttagatgaaattaaaccacttgatgatctaaacaacaagaaagacagttgtatgtccaatcatacagcagaaattgggaaagatcttgactatcttaaagatgtaaatggaactacaagtggtataggaactggcagcagtgttgaaaaatacattattgatgaaagtgattacatgtcattcataaacaaccccagtcttactgtgactgtaccaattgctgtaggagaatctgactttgaaaatttaaacacggaagactttagtagtgaatcggatctggaagaaagcaaagagaaactgaatgaaagcagtagctcatcagaaggtagcactgtggacatcggcgcacctgtagaagaacagcccgtagtggaacctgaagaaactcttgaaccagaagcttgtttcactgaaggctgtgtacaaagattcaagtgttgtcaaatcaatgtggaagaaggcagaggaaaacaatggtggaacctgagaaggacgtgtttccgaatagttgaacataactggtttgagaccttcattgttttcatgattctccttagtagtggtgctctggcatttgaagatatatatattgatcagcgaaagacgattaagacgatgttggaatatgctgacaaggttttcacttacattttcattctggaaatgcttctaaaatgggtggcatatggctatcaaacatatttcaccaatgcctggtgttggctggacttcttaattgttgatgtttcattggtcagtttaacagcaaatgccttgggttactcagaacttggagccatcaaatctctcaggacactaagagctctgagacctctaagagccttatctcgatttgaagggatgagggtggttgtgaatgcccttttaggagcaattccatccatcatgaatgtgcttctggtttgtcttatattctggctaattttcagcatcatgggcgtaaatttgtttgctggcaaattctaccactgtattaacaccacaactggtgacaggtttgacatcgaagacgtgaataatcatactgattgcctaaaactaatagaaagaaatgagactgctcgatggaaaaatgtgaaagtaaactttgataatgtaggatttgggtatctctctttgcttcaagttgccacattcaaaggatggatggatataatgtatgcagcagttgattccagaaatgtggaactccagcctaagtatgaagaaagtctgtacatgtatctttactttgttattttcatcatctttgggtccttcttcaccttgaacctgtttattggtgtcatcatagataatttcaaccagcagaaaaagaagtttggaggtcaagacatctttatgacagaagaacagaagaaatactataatgcaatgaaaaaattaggatcgaaaaaaccgcaaaagcctatacctcgaccaggaaacaaatttcaaggaatggtctttgacttcgtaaccagacaagtttttgacataagcatcatgattctcatctgtcttaacatggtcacaatgatggtggaaacagatgaccagagtgaatatgtgactaccattttgtcacgcatcaatctggtgttcattgtgctatttactggagagtgtgtactgaaactcatctctctacgccattattattttaccattggatggaatatttttgattttgtggttgtcattctctccattgtaggtatgtttcttgccgagctgatagaaaagtatttcgtgtcccctaccctgttccgagtgatccgtcttgctaggattggccgaatcctacgtctgatcaaaggagcaaaggggatccgcacgctgctctttgctttgatgatgtcccttcctgcgttgtttaacatcggcctcctactcttcctagtcatgttcatctacgccatctttgggatgtccaactttgcctatgttaagagggaagttgggatcgatgacatgttcaactttgagacctttggcaacagcatgatctgcctattccaaattacaacctctgctggctgggatggattgctagcacccattctcaacagtaagccacccgactgtgaccctaataaagttaaccctggaagctcagttaagggagactgtgggaacccatctgttggaattttcttttttgtcagttacatcatcatatccttcctggttgtggtgaacatgtacatcgcggtcatcctggagaacttcagtgttgctactgaagaaagtgcagagcctctgagtgaggatgactttgagatgttctatgaggtttgggagaagtttgatcccgatgcaactcagttcatggaatttgaaaaattatctcagtttgcagctgcgcttgaaccgcctctcaatctgccacaaccaaacaaactccagctcattgccatggatttgcccatggtgagtggtgaccggatccactgtcttgatatcttatttgcttttacaaagcgggttctaggagagagtggagagatggatgctctacgaatacagatggaagagcgattcatggcttccaatccttccaaggtctcctatcagccaatcactactactttaaaacgaaaacaagaggaagtatctgctgtcattattcagcgtgcttacagacgccaccttttaaagcgaactgtaaaacaagcttcctttacgtacaataaaaacaaaatcaaaggtggggctaatcttcttataaaagaagacatgataattgacagaataaatgaaaactctattacagaaaaaactgatctgaccatgtccactgcagcttgtccaccttcctatgaccgggtgacaaagccaattgtggaaaaacatgagcaagaaggcaaagatgaaaaagccaaagggaaataaatgaaaataaataaaaataattgggtgacaaattgtttacagcctgtgaaggtgatgtatttttatcaacaggactcctttaggaggtcaatgccaaactgactgtttttacacaaatctccttaaggtcagtgcctacaataagacagtgaccccttgtcagcaaactgtgactctgtgtaaaggggagatgaccttgacaggaggttactgttctcactaccagctgacactgctgaagataagatgcacaatggctagtcagactgtagggaccagtttcaaggggtgcaaacctgtgattttggggttgtttaacatgaaacactttagtgtagtaattgtatccactgtttgcatttcaactgccacatttgtcacatttttatggaatctgttagtggattcatctttttgttaatccatgtgtttattatatgtgactatttttgtaaacgaagtttctgttgagaaataggctaaggacctctataacaggtatgccacctggggggtatggcaaccacatggccctcccagctacacaaagtcgtggtttgcatgagggcatgctgcacttagagatcatgcatgagaaaaagtcacaagaaaaacaaattcttaaatttcaccatatttctgggaggggtaattgggtgataagtggaggtgctttgttgatcttgttttgcgaaatccagcccctagaccaagtagattatttgtgggtaggccagtaaatcttagcaggtgcaaacttcattcaaatgtttggagtcataaatgttatgtttctttttgttgtattaaaaaaaaaacctgaatagtgaatattgcccctcaccctccaccgccagaagactgaattgaccaaaattactctttataaatttctgctttttcctgcactttgtttagccatcttcggctctcagcaaggttgacactgtatatgttaatgaaatgctatttattatgtaaatagtcattttaccctgtggtgcacgtttgagcaaacaaataatgacctaagcacagtatttattgcatcaaatatgtaccacaagaaatgtagagtgcaagctttacacaggtaataaaatgtattctgtaccatttatagatagtttggatgctatcaatgcatgtttatattaccatgctgctgtatctggtttctctcactgctcagaatctcatttatgagaaaccatatgtcagtggtaaagtcaaggaaattgttcaacagatctcatttatttaagtcattaagcaatagtttgcagcactttaacagctttttggttatttttacattttaagtggataacatatggtatatagccagactgtacagacatgtttaaaaaaacacactgcttaacctattaaatatgtgtttagaattttataagcaaatataaatactgtaaaaagtcactttattttatttttcagcattatgtacataaatatgaagaggaaattatcttcaggttgatatcacaatcacttttcttactttctgtccatagtactttttcatgaaagaaatttgctaaataagacatgaaaacaagactgggtagttgtagatttctgctttttaaattacatttgctaattttagattatttcacaattttaaggagcaaaataggttcacgattcatatccaaattatgctttgcaattggaaaagggtttaaaattttatttatatttctggtagtacctgcactaactgaattgaaggtagtgcttatgttatttttgttctttttttctgacttcggtttatgttttcatttctttggagtaatgctgctctagattgttctaaatagaatgtgggcttcataatttttttttccacaaaaacagagtagtcaacttatatagtcaattacatcaggacattttgtgtttcttacagaagcaaaccataggctcctcttttccttaaaactacttagataaactgtattcgtgaactgcatgctggaaaatgctactattatgctaaataatgctaaccaacatttaaaatgtgcaaaactaataaagattacattttttatttta

SEQ ID NO: 4-10 - skipped (7 entries)

SEQ ID NO: 11 - DNA, 24 bp, synthetic construct
  source 1..24: mol_type = other DNA
gctgatgctttgggaagtatgtta

SEQ ID NO: 12 - DNA, 25 bp, synthetic construct
  source 1..25: mol_type = other DNA
caccttccttctttttgattttgtc

SEQ ID NO: 13 - DNA, 21 bp, synthetic construct
  source 1..21: mol_type = other DNA
tacatgagtggctatcatact

SEQ ID NO: 14 - DNA, 27 bp, synthetic construct
  source 1..27: mol_type = other DNA
catggtacatgagtggctatcatactg

SEQ ID NO: 15 - DNA, 25 bp, synthetic construct
  source 1..25: mol_type = other DNA
tggtgtcatttagtgctgctctatg

SEQ ID NO: 16 - DNA, 21 bp, synthetic construct
  source 1..21: mol_type = other DNA
ccagcatttccatataatagc

SEQ ID NO: 17 - DNA, 20 bp, synthetic construct
  source 1..20: mol_type = other DNA
caggaggattccgtgctgtt

SEQ ID NO: 18 - DNA, 24 bp, synthetic construct
  source 1..24: mol_type = other DNA
cagtgctgtatcatcccaaatgtc

SEQ ID NO: 19 - DNA, 15 bp, synthetic construct
  source 1..15: mol_type = other DNA
acaggccagagcgat

SEQ ID NO: 20 - DNA, 21 bp, synthetic construct
  source 1..21: mol_type = other DNA
agccctttattatgggtggtt

SEQ ID NO: 21 - DNA, 24 bp, synthetic construct
  source 1..24: mol_type = other DNA
ccagaatataaggcaaaccagaag

SEQ ID NO: 22 - DNA, 25 bp, synthetic construct
  source 1..25: mol_type = other DNA
tggatggaattgctcctaacagggc

SEQ ID NO: 23 - DNA, 23 bp, synthetic construct
  source 1..23: mol_type = other DNA
ccctaagagccttatcacgattt

SEQ ID NO: 24 - DNA, 20 bp, synthetic construct
  source 1..20: mol_type = other DNA
ggcaaaccagaagcacattc

SEQ ID NO: 25 - DNA, 24 bp, synthetic construct
  source 1..24: mol_type = other DNA
agggtggttgtgaatgccctgtta

SEQ ID NO: 26-28 - skipped (3 entries)

SEQ ID NO: 29 - DNA, 20 bp, synthetic construct
  source 1..20: mol_type = other DNA
ggcaaattcaacggcacagt

SEQ ID NO: 30 - DNA, 20 bp, synthetic construct
  source 1..20: mol_type = other DNA
gggtctcgctcctggaagat

SEQ ID NO: 31 - DNA, 27 bp, synthetic construct
  source 1..27: mol_type = other DNA
aaggccgagaatgggaagcttgtcatc

SEQ ID NO: 32 - DNA, 19 bp, synthetic construct
  source 1..19: mol_type = other DNA
actttcataatgctggcag

SEQ ID NO: 33 - DNA, 20 bp, synthetic construct
  source 1..20: mol_type = other DNA
cactttcataatgctggcag

SEQ ID NO: 34 - DNA, 19 bp, synthetic construct
  source 1..19: mol_type = other DNA
cactttcataatgctggca

SEQ ID NO: 35 - DNA, 20 bp, synthetic construct
  source 1..20: mol_type = other DNA
tcactttcataatgctggca

SEQ ID NO: 36 - DNA, 16 bp, synthetic construct
  source 1..16: mol_type = other DNA
ctttcataatgctggc

SEQ ID NO: 37 - DNA, 17 bp, synthetic construct
  source 1..17: mol_type = other DNA
actttcataatgctggc

SEQ ID NO: 38 - DNA, 18 bp, synthetic construct
  source 1..18: mol_type = other DNA
cactttcataatgctggc

SEQ ID NO: 39 - DNA, 19 bp, synthetic construct
  source 1..19: mol_type = other DNA
tcactttcataatgctggc

SEQ ID NO: 40 - DNA, 16 bp, synthetic construct
  source 1..16: mol_type = other DNA
actttcataatgctgg

SEQ ID NO: 41 - DNA, 17 bp, synthetic construct
  source 1..17: mol_type = other DNA
cactttcataatgctgg

SEQ ID NO: 42 - DNA, 18 bp, synthetic construct
  source 1..18: mol_type = other DNA
tcactttcataatgctgg

SEQ ID NO: 43 - DNA, 19 bp, synthetic construct
  source 1..19: mol_type = other DNA
ttcactttcataatgctgg

SEQ ID NO: 44 - skipped

SEQ ID NO: 45 - DNA, 20 bp, synthetic construct
  source 1..20: mol_type = other DNA
attcactttcataatgctgg

SEQ ID NO: 46 - DNA, 19 bp, synthetic construct
  source 1..19: mol_type = other DNA
attcactttcataatgctg

SEQ ID NO: 47 - DNA, 20 bp, synthetic construct
  source 1..20: mol_type = other DNA
agattcactttcataatgct

SEQ ID NO: 48 - DNA, 20 bp, synthetic construct
  source 1..20: mol_type = other DNA
gattcactttcataatgctg

SEQ ID NO: 49 - DNA, 19 bp, synthetic construct
  source 1..19: mol_type = other DNA
gattcactttcataatgct

SEQ ID NO: 50 - DNA, 19 bp, synthetic construct
  source 1..19: mol_type = other DNA
tcactttcataatgctggt

SEQ ID NO: 51 - DNA, 19 bp, synthetic construct
  source 1..19: mol_type = other DNA
tcactttcataatgctgga

SEQ ID NO: 52 - DNA, 20 bp, synthetic construct
  source 1..20: mol_type = other DNA
ttcactttcataatgctggc

SEQ ID NO: 53 - DNA, 19 bp, synthetic construct
  source 1..19: mol_type = other DNA
  modified_base 19: mod_base = OTHER; note = uracil
tcactttcataatgctggt

SEQ ID NO: 54 - DNA, 20 bp, synthetic construct
  source 1..20: mol_type = other DNA
tcactttcataatgctggaa

SEQ ID NO: 55 - DNA, 20 bp, synthetic construct
  source 1..20: mol_type = other DNA
tcactttcataatgctggat

SEQ ID NO: 56 - DNA, 20 bp, synthetic construct
  source 1..20: mol_type = other DNA
tcactttcataatgctggac

SEQ ID NO: 57 - DNA, 20 bp, synthetic construct
  source 1..20: mol_type = other DNA
tcactttcataatgctggtc

SEQ ID NO: 58 - DNA, 20 bp, synthetic construct
  source 1..20: mol_type = other DNA
tcactttcataatgctggtt

SEQ ID NO: 59 - DNA, 20 bp, synthetic construct
  source 1..20: mol_type = other DNA
tcactttcataatgctggta

SEQ ID NO: 60 - DNA, 20 bp, synthetic construct
  source 1..20: mol_type = other DNA
tcactttcataatgctggcc

SEQ ID NO: 61 - DNA, 20 bp, synthetic construct
  source 1..20: mol_type = other DNA
tcactttcataatgctggct

SEQ ID NO: 62 - DNA, 19 bp, synthetic construct
  source 1..19: mol_type = other DNA
ctcactttcataatgctgg

SEQ ID NO: 63 - DNA, 19 bp, synthetic construct
  source 1..19: mol_type = other DNA
atcactttcataatgctgg

SEQ ID NO: 64 - DNA, 18 bp, synthetic construct
  source 1..18: mol_type = other DNA
agttggagcaagattatc

SEQ ID NO: 65 - DNA, 20 bp, synthetic construct
  source 1..20: mol_type = other DNA
aagttggagcaagattatcc

SEQ ID NO: 66 - DNA, 19 bp, synthetic construct
  source 1..19: mol_type = other DNA
agttggagcaagattatcc

SEQ ID NO: 67 - DNA, 19 bp, synthetic construct
  source 1..19: mol_type = other DNA
aagttggagcaagattatc

SEQ ID NO: 68 - DNA, 3120 bp, synthetic construct
  source 1..3120: mol_type = other DNA
cagcagcgcactcggtgccccgcgcagggtcgcgatgctgcccggtttggcactgctcctgctggccgcctggacggctcgggcgctggaggtacccactgatggtaatgctggcctgctggctgaaccccagattgccatgttctgtggcagactgaacatgcacatgaatgtccagaatgggaagtgggattcagatccatcagggaccaaaacctgcattgataccaaggaaggcatcctgcagtattgccaagaagtctaccctgaactgcagatcaccaatgtggtagaagccaaccaaccagtgaccatccagaactggtgcaagcggggccgcaagcagtgcaagacccatccccactttgtgattccctaccgctgcttagttggtgagtttgtaagtgatgcccttctcgttcctgacaagtgcaaattcttacaccaggagaggatggatgtttgcgaaactcatcttcactggcacaccgtcgccaaagagacatgcagtgagaagagtaccaacttgcatgactacggcatgttgctgccctgcggaattgacaagttccgaggggtagagtttgtgtgttgcccactggctgaagaaagtgacaatgtggattctgctgatgcggaggaggatgactcggatgtctggtggggcggagcagacacagactatgcagatgggagtgaagacaaagtagtagaagtagcagaggaggaagaagtggctgaggtggaagaagaagaagccgatgatgacgaggacgatgaggatggtgatgaggtagaggaagaggctgaggaaccctacgaagaagccacagagagaaccaccagcattgccaccaccaccaccaccaccacagagtctgtggaagaggtggttcgagaggtgtgctctgaacaagccgagacggggccgtgccgagcaatgatctcccgctggtactttgatgtgactgaagggaagtgtgccccattcttttacggcggatgtggcggcaaccggaacaactttgacacagaagagtactgcatggccgtgtgtggcagcgccatgtcccaaagtttactcaagactacccaggaacctcttgcccgagatcctgttaaacttcctacaacagcagccagtacccctgatgccgttgacaagtatctcgagacacctggggatgagaatgaacatgcccatttccagaaagccaaagagaggcttgaggccaagcaccgagagagaatgtcccaggtcatgagagaatgggaagaggcagaacgtcaagcaaagaacttgcctaaagctgataagaaggcagttatccagcatttccaggagaaagtggaatctttggaacaggaagcagccaacgagagacagcagctggtggagacacacatggccagagtggaagccatgctcaatgaccgccgccgcctggccctggagaactacatcaccgctctgcaggctgttcctcctcggcctcgtcacgtgttcaatatgctaaagaagtatgtccgcgcagaacagaaggacagacagcacaccctaaagcatttcgagcatgtgcgcatggtggatcccaagaaagccgctcagatccggtcccaggttatgacacacctccgtgtgatttatgagcgcatgaatcagtctctctccctgctctacaacgtgcctgcagtggccgaggagattcaggatgaagttgatgagctgcttcagaaagagcaaaactattcagatgacgtcttggccaacatgattagtgaaccaaggatcagttacggaaacgatgctctcatgccatctttgaccgaaacgaaaaccaccgtggagctccttcccgtgaatggagagttcagcctggacgatctccagccgtggcattcttttggggctgactctgtgccagccaacacagaaaacgaagttgagcctgttgatgcccgccctgctgccgaccgaggactgaccactcgaccaggttctgggttgacaaatatcaagacggaggagatctctgaagtgaagatggatgcagaattccgacatgactcaggatatgaagttcatcatcaaaaattggtgttctttgcagaagatgtgggttcaaacaaaggtgcaatcattggactcatggtgggcggtgttgtcatagcgacagtgatcgtcatcaccttggtgatgctgaagaagaaacagtacacatccattcatcatggtgtggtggaggttgacgccgctgtcaccccagaggagcgccacctgtccaagatgcagcagaacggctacgaaaatccaacctacaagttctttgagcagatgcagaactagacccccgccacagcagcctctgaagttggacagcaaaaccattgcttcactacccatcggtgtccatttatagaataatgtgggaagaaacaaacccgttttatgatttactcattatcgccttttgacagctgtgctgtaacacaagtagatgcctgaacttgaattaatccacacatcagtaatgtattctatctctctttacattttggtctctatactacattattaatgggttttgtgtactgtaaagaatttagctgtatcaaactagtgcatgaatagattctctcctgattatttatcacatagccccttagccagttgtatattattcttgtggtttgtgacccaattaagtcctactttacatatgctttaagaatcgatgggggatgcttcatgtgaacgtgggagttcagctgcttctcttgcctaagtattcctttcctgatcactatgcattttaaagttaaacatttttaagtatttcagatgctttagagagattttttttccatgactgcattttactgtacagattgctgcttctgctatatttgtgatataggaattaagaggatacacacgtttgtttcttcgtgcctgttttatgtgcacacattaggcattgagacttcaagcttttctttttttgtccacgtatctttgggtctttgataaagaaaagaatccctgttcattgtaagcacttttacggggcgggtggggaggggtgctctgctggtcttcaattaccaagaattctccaa

SEQ ID NO: 69 - DNA, 296000 bp, Homo sapiens
  source 1..296000: mol_type = genomic DNA
gtactgtaaaaagacacagacaagccagaacacatttagagaatggccaaggtgtggaaggaaccagaaaccatgccattatgcaactgttgaaggaagtgcctgttttaccttgtgaagagaagactctagaggaagaagtagcatgaaaaccgctggcaaatttgtaaagatctgaagtgtggaaaagaattattctgcttggtcactggggatacaaggatatctgagtgggagtttaaaggcgggggatgtgagctttaaatgggataagaacattctagtaaccagaaatgcccaaagatagaatgcacagtctggagagccagtgaatatctcacaaatggagacacttgaaactaggatggggatgctgttgtaggaattccagcagacaagtggttgttggttccttccccaactttgtagggttataactagggatgttcctgcgttttctgcttggaggatctgcaagacacctcagggcaggaaatggcattaaatgcagaacagagctagtggctgaaaagcaaaaagccatcaggatctctgagtagtgaaggaaccagagaacatgcaggcaatgtccatcattctgacgcaatcagcagcataatcatcttcccccaggaacatcttgaccagggaatgtgtcagtgtggtgaatttcaacagtggaaagagaaactgctaaatctaagaactttaatttttatagattatgatctcatctctacaattttgaatttcatgctcaataaaagttccttactctctttttttttttttgagacggagtctcgctctgtcgcccaggctggagtgcagtggcgcgatctcggctcacttcaagctcagcctcccgggttcacgccattctcctgcctcagcctccccagtagctgggactacaggcgcccgccacgacgcccggctaattttttgtatttttagtagagacggggtttcaccgtgttagccaggatggtgttgatctcctgacctcgtgatccgcccgcctcagcctcccaaagaaaagtccctcactcttaaagttgcctcctccttcccagggctggcttcatgggcatgcaaccctggagagtctcacaggccctgcggtgggaggagccccatgcttggtttaacgctctgccattgccatcttaaaattcttaatttaattttttttcttttttttgaggtggagtctcgctctgtcgcccaggctggagtgcaatggcacaatcttggctcactgcaacctccgcctcccaggttcaagcgattctcctgcctcagcctctggagtagctgggattacaggcaggagtaaccacgctcggctaatttttgcatttttagtagagatgggggtttcaccatgttggccaggctggtctagaactcctgacctcaggtgatctgcccacctgggcctcctaaagtgctgggattacaggcatgagccaccaggcccggccttaaaattcttaataatgtaacaaagggtctcacgtttgcattttgcagtggactctgcaagatttgtagctttggaccacgtttctctttgcattcagataccttcttttttgccttatttgctcatgcagacccggaacaaatacggaattgcggtgggtaaatgtggtgcagaaagtgaacaactgggtttgtcctgtcactttaggcttttccctgctgtcccagcttcatgtcacttacttgctattagatttgggagttcattagcttcattttcctgatgtataaataggaataatagtaacagcctctttggcttttgtaggaagtaaatgacatgaagcgtataaacaaatactgcatgacaataaatatttgtccttatttgttgaggacatccaaaggacattcaggggcaaaagtaatccaagagtcaagactgaatgcctagtgcgggaaaagacacacaagacaacatttaggggagctggtacagaaatgacttcccaggaaggaagtctgtaccccgctggctgagccatccttcccgggcctaggcacccttgtcagcgcaatgagcaagggagagaaggcaggctgcagtgcagccctcagaagggccagagcactccctggcttcagtccttcgctccaagccctgtgtggagtgggctgtggcttggtaactaaatgctacttcaggtcaagagcaggggatatatctgggcagttctagagcattctaaactatctggacactaactggacagtggacggtttgtgtttaatccaggagaaagtggcatggcagaaggttcatttctataattcaggacagacacaatgaagaacaagggcagcgtttgaggtcagaagtcctcatttacgggggtcgaatacgaatgatctctcctaatttttccttcttccccaactcagatggatgttacatccctgcttaacaacaaaaaaagaccccccgccccgcaaaatccacactgaccaccccctttaacaaaacaaaaccaaaaacaaacaaaaatataagaaagaaacaaaacccaagcccagaaccctgctttcaagaagaagtaaatgggttggccgcttctttgccaggtcctgcgccttgctcctttggttcgttctaaagatagaaattccaggttgctcgtgcctgcttttgacgttgggggttaaaaaatgaggttttgctgtctcaacaagcaaagaaaatcctatttcctttaagcttcactcgttctcattctcttccagaaacgcctgccccacctctccaaaccgagagaaaaaacgaaatgcggataaaaacgcaccctagcagcagtcctttatacgacacccccgggaggcctgcggggtcggatgattcaagctcacggggacgagcaggagcgctctcgacttttctagagcctcagcgtcctaggactcacctttccctgatcctgcaccgtccctctcctggccccagactctccctcccactgttcacgaagcccaggtgggccgtcggccggggagcggagggggcgcgtggggtgcaggcggcgccaagggcgcgtgcacctgtgggcgcggggcgcgagggcccctcccggcgcgagcgggcgcagttccccggcggcgccgctaggggtctctctcgggtgccgagcggggtgggccggatcagctgactcgcctggctctgagccccgccgccgcgctcgggctccgtcagtttcctcggcagcggtaggcgagagcacgcggaggagcgtgcgcgggggccccgggagacggcggcggtggcggcgcgggcagagcaaggacgcggcggatcccactcgcacagcagcgcactcggtgccccgcgcagggtcgcgatgctgcccggtttggcactgctcctgctggccgcctggacggctcgggcgctggaggtgggtgccgcgcctcggaaggcggggggaggctgcacggtggggacgcgataccccccaagaccttaacccaagtctttaatgcagagaagccgggggtccgtcaatgggacccctctcctctccgcccccgcttgcggacgtccagcgcatccccgctttcggcccagccctgccccagggagtcgcgctccggcccgctgagagggagcgggcgaggcgctggtctccctggttccgcgccagcccggggcgagaagggtagggggcgaccctgagcccagaccccgacttagtccctgccttggaagcgggggtcgggggaggcgagagacattcagacaggggggaagggggaaggagcacgtggggaaaaccgaaaacgcagcgtccctaaagccagtccttcgctcttgaatcgttgccctttcctttctcttgggccctggggaggaggaggaggagtcgggacagcccaggaagctaggagcccctcgcttttccctgcgttctccgcctcgtttcaccttcctctctcacccccatcccccttccttgctccaacctcttttcgcggctgctggcggcggcagcctgggtgcgaccctagcccgagccggcgtcggggtcgcgcaccgccttccacaggcaaactttgtgcatgtccgcgtctcccttttgtgtaacttgcgagaaatgggaggggtcggagacccatagccaccccgcgccttccccaagtctggacgtcccgggagttcgctcgcaccctaagctctgtctgagaggcagaaggtccgcgggaacaaaagccgcgacaccccgccctcgccgtgggccgagccgcgttagtctcagtgcgccaccgaggctcccgcccggctcccttcccggggctgcgcgtccgcctgggagggggcagagacgctgccggggcttctggcggagcctcggggcccctctgcttcccaccctcggatcacctccgaggcttaattctgtgctgggctgtaaagtccttggcggggaggaaataaggcggagagtgggatgtgcgtctggaaagggcagtggcggatggtggggaggcacgggctctgtcctgtgcatccaaggaggcgtttgtctgattaaggcgcggcctcttccctggcagctctggggactctggtttagttcccctgggggcacaggatgctggggagggtccgaagggtcttttttttagggtgcagataaaaggatcgaattgagtgaagattaagacggagaagatggcgcctctgcagtgcagcaaagaaaagctgtgtggaggctgcagcctagtgaaatccacccaccactaggtgtataacaagtcttccccattcatccaactctcgaacattcagctaacgcctgtgcacaatgactgtttttctttacatctgaagatgcttagaagttgtttgcatgacagttgggccagaggaggctgtatttcacttcggacttcggttgggttcctgtttggcatcttaacatttgcaaccttccttacccgtttttcccctcttttcccccagcctcctagtaattttccaaaagaaaaaaagcaatttccgggcagatgttttcctgtaattccactgaggctgtacagactatcacaccattagttttttagtttctaatttgcaaggtcattgaacttttttctcttctgatttttacccacaagtggctcaggaatcaccttagggctagttaagacaggttgttttaagagttaaagaatttcgttttccatgttttaaaaaaatgcacttaactaagagaattctgatttctctcatgacttacttacatttatttgtagaattattccagttttcccgaatggtcttactacagattaaaaaccatacatttaaggaattaaaagcatatgataaccgtatttttgaagcttttgtcaaaacttaaatatgtaactttgttgagcaatatttctttctgtataaaaagaggaagcatgtaggcagattcgaatttagtttttggtctgtttaattgcattaatatgctctttctgccatcttttgggaccttttcagtagctattgttaactcctttaaagggtggaggtgagattcacattatgccattttgcgaagtgttggtagaagggtaggtaattcagtctactgaggtttgagggtggtttatctggttctctctgtgtccactgaaaagatgtaattacgagttgactgtcttttatagagcttagaaaataggtctgctgcaggtggctgtagaaaagaaatgaataagggcaatgataatggggccttggctatcgggggaaacatggttattatctgggttgatgattttggctggtatgttgatagaggtgtgagtttaacaaaccctaatctatatgatgtttcactaccctaatatttatttatttatttatttttaaatctagcttcctcttaagttttatttccctctgttgagggtttaacctagtcacaatcatcttacctttgtggtagtgctaatttatagtttatggaaacctgctgctactgactagtacctcgctaaaggtagaagccgacacacagaatagtaaagctcaggtttgatggtgatctgtaaggagtcacggttcttgctaatcgatgagaaaccatgataactggcagactgcagaagcttttctcttgtcaccggaaccagcagaggctcctgaacgacatttgcaaggctattagtactgcggagaagttactagatggaataatactggtcctgactgaggaaatgaaaaggaacatgcaagttcacgaggttaaatgaggaatggctgattcaaaaaaattaaaaagaaataacgtgatcaacaatattggtttgaaggaatgggagaggttgtctttatgttaagtcttgttgctagaggatctctattttatgttactgttttttgcatactagagtcttctacagatatttgtatgaatgttgtcagtcattctggaaataagcatagctattacttgcatttcacgtggccactaaactatcagtgagaagtgcattaaattcagtagaaatgtacattgtttctgcaaattgtattaccttgagaatcttacaaagcatctttcattaatacatttcttttaaaatctctatcaattacaaatgtaaagataaacctgtacagatgcattttaaatttaaagcttccagaatgtaaggtttagttcgactgcatacctcattacctccccttccctcctccctccccttactcccaggaagtttgcagggtaaataaaacatgcacatgataataaaacaaagtggaatgtactaaaataccaaaaggaaaatacagattaggtatactgagtaaatatgttacagagaaaacttcctgtatttaaaaagtaaggaacaatgggatgagatcatagataatcctggagcatttcctggtagtaaatttccagccaggtttatatcccaggtctggggattggaggttaagtttctgcatatacaatatttgtttacattcctctctgcctctaccagacagacagacagacacacacacacacacacacacacaccctctgtctctttctctctctttctctctctctctctctctctctctctctctctcacttgagtgacagatgctggtgcagggtattctcaacaggagtagggaatttgaaataaggagttgagaggtcaaaggtaaggggctgaatgcaggaccagagagcttcagtagcatcttgatgggcagagtatgagatgaacagtggcaacgaggaggatagggaaaaatcacattttctgtttgtgttttgtttttgtctggtggttttcaacctctctctgtttcacttgactatgcttgattatgaaatcttttttttttctttttttaatttaaagatctcaactggctttgttgtgattctacattcaggcaacactattctgtaaaatagtataaatgttccgatgagttgaacagaggagattggctttgtagacagaaaagggctgaagaaaacagaaataaaaaaatcttttccttttcatagtgagagctcagatgcaaatgtatggagtggggatggatgggaaatgccgtcttttgcaaacccttggaaacgctgtcaccctgtgggtctcacagccagtgtacagataacaccctcatctgtacacagaagacagaaggtggcaggggaaggaatgagcacaccccagaatgagtagcaagtttaatcaataaaatatgtatttctttttttattgttgtataagaagaaaagcagacagaactcaaaccctgaagctgattttgcaagtgaaaagcttagtaaagggggaaatgttatgtaactattttttcagtttagtgtggatggcttaagaaataatcattactgtgaggacactagtatttttcttggaaaaaaaagtttggcaaattttcctctttagattaatcttggttatagattattattatgcttgagtggtacctcttcagaagtagaaatctggcaaaaactggagtacaatgattgctctaggaataaattcacatatttaaatttaaaagcctggatatgtgcatcaattaatagctttatgaaacagggatgcttagtagattagctagctgagtattcagagagggccacagaagtctcaggttcacatgtattaaatctgctgaaatagaaacctaagagatcattttatttaggtttattttgtgtggctacatgttgaagaaacatgcaatagagatttagcttgaaccttgcgagactcacagtatcttacgaaagaagatagttaaaatggggaagatgagaggtttttaaaaatgtcacctctgtagaacgaaccagagttgttctcaatttataatgttgaatttgatgccaggcgtgatgttaggccaataacactgagtcattgagtgtttctcaggtatgtagagaaggcagcattgcacactaatcaggagagtttagaccagggcaggaatgcatgggcataaattctgtctttgtttcttttgagctagtgaccatgggcaagtttctgtgcctcagttttttcctttgtaaaatgggatgagtacttctagttattgaggatcgaattaatatctttgttaaatgcttgaaacagtgtgtgagttaatatatatgtaacctgatggcatagcataagcactgtgtgttagttgctgctatgtatggtgatgatgttgatgtacaatgggtatatgtaagtttcctgcatagttgaaagttaaaaatctagatgatgtttcacttattgacaaattacttattggccaattaagactattgcaggaaattgacagattgttgtctatgagtttgatctaaatttaaaaagcacatggtatctcagatacaatttttagaatacatgttataaaatttcatttattaaatatgtattgtgtatttcaattggttttttgaaaaatgaaaataattcatgctcattgaaaaatttaaaacagtacagaaatgtgcaaaaagcataagcattttttacacaaatgggaaatacctagtttttttttttctttttttccacataacatggatgtagaccttttttttttttttttgagacagaatctccctctgtcacccaggctggagtgcagtggcgcgatctcggctcactgcaacctccgcctcctgggttcaagcgattctcctgcctcagcctcctgagtagctgggactatgggcactcgccaccatgcccagctaatttttgtattttttaagtagagatggggtttcaccatgttggccaggctggtctcaaactcctgacctcaagtgatctgcccacctcggcctcccagagacctattttttaatgttgtacacactggcagcttgccacagatgtctaatattgagcaagtttatacactggcttgattattaactattagttggctatcagctatgtgcaaggaactgtgaacagacttggtttagttttcagtagaatctttgctagcaaaacgaataaacaggctttgccaatctgggtagaaatggaagatttcaaatgccagcaaaagaattttggtcctaatatggaagcttgaagttatgttcacccaaggacagggaaaccaaaaagcagattgcttgagaatgcggcatttctctaggaaatcagtttcaaaataaaatgaattttttgttttgttttgtttttgagacggagtctcgccctgtcgcccaagctggaatgcagtggtgcgatctcagctcactgcaatctccgcctctcaggttcaagcgattctcctgcctcagcctcccgagtagctgggattacaggcgtgtgccactatgcccagctaatttttatatttttagtagagacggggtttcactatgttggtcaggctggtctcaaactcttgacctcgtgatccgcctgcctcggcctcccaaagtgctgcgattacaggcgtgagccaccgcgcccagctgcagtaaagtgaatttgtgtaaccagccatgttatggctgttacatctttaaaactttatagtgatctgctgtttaattgaaattatatattttttttaaaaatcagcatatgttgctcaaaaataaaaggtttttagcttcaaaagcaggccaaggatatttgaaagccttgagtgtatgaaactggtgatactgtggttaaatgatgatgaacgcagggaaaaatcaagaagcagagtcccaaagaattcacatgggtttttgttaaccagctcatgtaattataattgtcctgtccaactaaagacaagaagacaagaagtgggttcacatacgaggatgtgtaatgacagaagccatatttgtgataaacatcctgattacagtagatacagtgaggagtgattaagatggttccagaagcaggagtggagggttcatgagcagggatgaggaataaataggacaaacattttggaaaagggaaaagatgaataagcctgttttgtaaattaatggatcctgatgaatgaagtgcagtgattccttaaggtcttattaatgatggaccccaaacagtgtttgaatctcttaatttccagatggttcctttttttcttcacaaagtcagaaggttttcttatgagaaatttgattcaacaagaataattgtcacttcttttgttttttggtgatttttttttttttttttttttttttttttgagactgagttttactgtgtcacccaggctggagtgcagtggcgtgtcttggcttactgcaacctctgcctcccgggttcaagcaattctcatgcctcagcctcctgaatagctgggtttacaggcatgtgccaccacgcctggctaatttttgtttttgttttttttttttttagtagagacagggtttcactacattggccagggtggtctcgaactcctgacttcaagtgatccacccacctaggcctcccaaagtgctgggataacaggtgtgagccactgcacctggccaattttttggtgattttgataggaatttttttttttgcctgatgctttttttgagagaatctaataatttgtctcttatttaataatttggctttcattagcttccagaaagccacatactgtcttcattgaaaaatgtaaggcatcctagatgatacagactgataaattacttttcagccataaaagatacttatgagaataagagatctgttgcataaagaaaagtcatttgtgttaagtgaagaaatgcattattactcttgctgctttgctaaatttcaaacattgaataactaatatattttgaccccctggagatattttacaggaagaaaaatgagaggtttaatcctactgttgagatagacttaacgtgttttagacctgcccctcatcccaagttactacaaactcatttgtttagtttttccttgtctgtgtgctcgttatttcacagtaaaattagtgaggcaacataaattttatttttaagagaaagtaaagaaaatggctttatccattaaaggtttattcatcttaaaaaaggacttgttatatctactcctactattggatgaattttcaaaagcatattgatactgtgtttggttttgtttgttttcgggacaagtcctcactctgtcacccaggctgaagtgcagtggtgtgatctgtagccgtggcctcctgggctgaagccatcttcctgccccagcctccagagtagctgggactacaggcatgtgccaccacatctgactaatttcttaaatgttttgtagagatggggtccccactatgttgcccaggctgatcttgaactcctgggctcaagcgatcctcctgcctcgaccttccaaagtgctagattacaggtgtgagctattgtgcctggccaatgttgtttttataaatatcattactcagttattttgtttataattgaattgataggctcatagaataaagatggataagcactgtttcttaactgtatttattgatttttttatctttcaaaaaaaaaatcctcatctacttcaaagattaagcctttaaaaccgatgcaaagtttttgaagtcttagcttaagtcttcagagactaacattaaaacccatcatatgaaaagtgatatgtagtagcaaatattctccatcctgatgctctcaattgcttattatggtttaacacaaatataattttgtcattacagtaaattagtttgaggatataactgaagagtacctaagaaactcccatagaaatgtgaaaatatgcagactaattattctaagaataattaatcatagatacttacatattaaattgattagcaatttaaaattaaagccaaatttctgtggaaattagcttattttcatacacaaagaaacctagattcttaggggtacaaccaagaaagggccactccttcatttcacaaatattttcgaggtccttgcccccaagagggtagacagaataaaaaggaggaaggaagtgacttggaaaaaattaagttgggtaaggaatataagagaatgctacgtagaaggatgtgtgttgtgaatgcaatagtttctgtagtattgtcaaagttctctgatcatttcagtatgtgaaggtaaacttagataactgggggaaggaactatatatttactacattgtaaaagaataattgtagacagaagatctactttgggtgattaaatgttgaaaacaagtggtgggagagagaagttagtgttgattgtgatcacacacttttctatacagtaatttgtttgatcactcatgataatgccttacattttgtatgtactaaataaatgagttctctagaaattctatgttgtggtgataaagaattacgttcagattgaagattcgaacagctgtgcaaccttctcaacatttaagaaactgcgaacaagcatagaaagaagattaaagccttttaaataagattcttttttttcagcctctttttggaacattttattgtgaaaaggtttcataaatactgtcaatacatcacgttcagtcatttgcaattgtatttcaaaaattcagttggcctgcaaaaagaaaaaatgcctcatttttgaaatatttcatccatgccctgattgattgggacactttcaatagagggtgcctagacataattttgtgtgaagaagttagtagagtttggaaagaaaatgtgtattggaattaaatttagtggcatgaaaatgaaaatttctctgtcattgtctttttttttggctccttttttggccattttacagctagtgtttagtgtgacaaggatcaaaattggccctttaaaaaaatatattgaattctattacctctgttatctaaaagaattgtatttttcaatttgaagagcttgaagccaatactactatataccattaacttgacaggaattgaaaatctaattgaggtcattatgattagccttgtatcttgctagtattttctcaatcttattttgaatgttttgtgtcaagtgttaaatcctcttataccacagaatccagaaaatttaaatgcaacagaagtaaaacgaatataaaaattctatggttgttgtggaggggcgttcttggctaacccatagggtgtttgaatgtaaaggcagcttacagaactgctgctagttgaattgtggagggtttcacttttaagagtacatttgagacaaaattgcaattttggaatcacttattcctgcttgttcagtgaaataggagaggggggaattcctgagggaagctgggagatttccaggtgatgatagagtagccatgtgagtatttggctgaaacagagtagaagccacctctgtctgttggacagaggtggccttaacactgagtatcaatcagcatggccattagagctgtccaggacaaacataatgaatgttgtggtggcagagagggtatacttaaatgaacaaaattggaggctgactttccttgtttcttggtagttcctttcttcgtatttgctatttggatatttcacttcacttttgtgagctagactcaaaggttaaatttatatcattgtgaattttctgggtcatattgtagggacacagatgggaagcatcccttcagtttattgagagtatttcttatgcgcatgtgtttttaattgtatttattgatttaataaatagccgatgagatgagaaaaaaatattagtgtcttgttgttgcagagaaaaagacattggatgcattcttagaatttattatcacatgcgaagttatttagatttacaaagcaatctgacatgttgacttcattgctcgtttgctcatttctatcagaggttgaacacaaagccaagcctaagcccgtgattcttctgtgtgcagatgagggggaaggtttaatgcagaatgtttagctgaatatttggattgtgcattccccttttatgtctctactgcaagttttctcagggcatttgtgattgacttctgtgatgttgacatttatttggagttagatgtttaaaaaattactaatttatggcctggtgcggtggcttacacctgtaatcccagcactttgggaggccaaggcgggtggatcacgaggtcaggagatccagtccatcctggctaacatggtgaaaccctgtctccactaaaaatacaacaaattaaccgggcgtggtgacaggcacctgtagtcccagctactcgggaggctgaggcaggagaatggtgtgaacctgggaggcagagcttgcagtgagccatcgtgccactgcactccagcctaggcaacagagcgagactccgtctcaaaaaaaaaaaaaatttactatcttattgtttctctcattttgaatttgtgaaattattattcattttatggacatactgcatggattctgtgtttcagttatgacaggagatctagaatctgggtggggctgtgagtaaatagaaaggtaactcagtctgtgccttgaggaattccgcagtccagtggaggaagaaagagacggagaaataattaggtacagtgtgccaaaggctataatagaggaggtacaaactcttcccagagaaggcaggcagaatttgaactaggtttcaaggatgtgtgaaggtgaactggggtggggagggcttcccagacagaaaaaacagcgagggtgtagagtttcaaagggggaagcccaggggtataataagtgaaggagacagtgtgaaattataaattttggatgcccttaatgagtttgaacttcattttcttagaaatggagtacttttaaatgttcctaaaatggggacgaggcattgatattcatggttcagttaggtttaggagcttttgtagaagtccttttcaaggtctgcttaatctcatgggccagatagtgacacctcgatgcaagggagcatgtaaatgtgctctattagctgggagcattgctatcagaaattacatttccggctctcttcttaagggtaaaggagaggtaggatattgagtggcaactggcattctgggatgtagaagaaatacagtaccataaagggatagaggaaaatgggtagacttaacgttctgaaccaaagctaagattctccgtgagcgattagagtaggcttttgggatttgcttaccttctcttatctgctagccagccacacaggaagcacatctttgtggagtgacagaggaggaggtaggaaatgctttctcatttttatggtagaaacatccaagagctgagccttcattctggctgagagaactctagatggttcagacttgcattcctgggaaggccttccagctagagtgatggaacaaagcaatgatttctgtggccctgtgtggacagcagtggcagtcagtttactctccctgttggttaactgtctttcgtttgatctagagacttcctcaaaacaattttgttgtgcttgttctttgaaagcaacagcagacaaaacaagctttgaggtttttagaaaagagcttgacactgagcacctcttttgagctagatctgtctgtcatgctgaacctgttttctgtggctgcgtagcttttcaaatctgtttatgcttgctggtgttattgaaacagaatgggaagatctatgcaaaaaggaacattgatcttaataaatttatgtcagtaagaatgggactgccattttaaaatttattttaattccttacctattttcttgttcaattattctaaaagtgattaaatgaagatacgtcacagaaagtatgctttgaaatcaagatgtggggaaaacctgtagttctgagtaggcctgatagaatcatcattgttagagtatttggaggttttgtagtagggattttgtcttcacttaaatatttagttgaaatatgttccaatagtttgacacattacagaatctgtctgaaagaaatgtctaaaatatgattcctcagaagctgctcttggttttactttctgctgttggttttactttctaacatttcattttgatcccgcagttttaagagtaatcaaaaaggccgggcacggtggctcacacctgtaatcccagcacttcgggagactgaggtgggtggatcacttgaggtcaggagttcaaggccagcctggccaacatggtgaaaccccgtctctacaaaaaatacaaaaatcagccgagcgtggtggtgcatgcctgtagtctcagttactcgggaggctgagacaggagaatcccttgaacccaggaggcggaggttgcagtgagccgagatcataccactgcattccagcctgggcaacagagccagactctgtctcaaaaaaaaagagtaatcaaaaagctacattatttaaatcttggcatgtctttaaaaaatgttaaactgtcaggaaaattatcacttctggataccaccttcagaaaaacacatgaaaatttgtgcatgtctcaaatagttgttaatttatgaaaaattagaaagagtgtttgaatgtatatttctgtcatattatattgctcatatttttaaattatactttttttcacccgtgaagcccatatagttaagtttgaaaattttaattatattagaatttgaaaattaaataaatctcctttaattcatgcataattttctaatagtcatatagtttgtattatataatttgagaaacttggttctaaaaaaattgtctgccaaagaatgtatatttctgaattctgttctgctttcatacatctgaaaatatttgagctatcataactggctatgcttcaaacccagtctgaaatgggtgacctttgctggctttggattgcagagctgggggctgttgtttgctttatctgatttaaaatagtcagtagtttattttgcaggcagttagatgtatacctttgcataaaatcattgaactgaaaaggttggcactccaagaatacgttgtgagaaaagagaacttgagtactcactctcgactcacctgaatcttattaatattttattgattaatatctgttgtatttttaagtaaataagctctctagaaactatctctgcttctttgttcatttaaaatatattaaacaaattgatacagattgcaaaaattagttgcaacgttcctagttagatatcaatgaaataaaaatggtctattcatacgagttcattttagttattcctactaatatcaaatgtgttttaaaaaatgggagattataatctttttatgaagtaagataaattattactttgtatatttaattcaaagaaaacaaaaaggccacaagtgcctgcataaaggcacatccacttaggattattgttaaggcctacagttgataattaggattcaggcatagcataaatgaagtggtatctttttttttttttttttttttgagacgaagtctcgctctgttgtccaggctggagtgcagtggcacggtctcggctcactgcaagctctgcctccctcctgggttcacgccattctcctccctcagcctcccgagtagctgggactacaggcttccgccaccactcccagctacgtttttttgtatttttggtagagacagggtttcaccatgttagccaggatggtcttgatctcctgacctcatgatccacccgtctcggcctcccaaagtgctgggattacaggcatgagccaccgcgcccagccagatatcaattatttttagacccaatgatatttgctgttgatttattgttggtgcacaaaataagaaaacaaaagcatggttttaaaacagccctttacacatttaatatggaaatggtaacctacaggtctgtattccatacagattcctgggctcattttatctgtgaattcctctgggcgtcatgcatgcccaggactgactttaaagcagaattatccagtagaggtataataggaccgttagatctaatttaaagttttcaagtagccacataaaaaaataagcaggcgaaattaattttagtctgtcactaaattcaaaatgttatttcaacagggggtcaatataaaagctatttatgaaatacattattttttcatattatgtcttcaaaatgttcacatttcacatatttattttttattttattattactatttttttgagacggagtctcactcagtcggttgcccaggctagagtgcaatctagcttgctcattgcaatcttggctcattgcaacctccacctcctgggttcaagcagttttcctgcctcagcctcctgagtagctgggattacaggcgtgtgccatcacacccagctaatttttttatttttggtagggatgagatttcaccatgttggccaggctggtcttgaactcctgacctcaagtgacttgccgctttggcctcccaaagtgccgggattacagttgtgagccaccgcacctgattacatatttcacatattttaattcagaccagctgcatgtcaagtacttagtagccacagatggctagtggttactgtattggacagtgcagctctaggagagtctcttcaacctgcagctgtctaggaagagaatcatagtttctggaacaggtagaatctataagacctcctttttaagcttctccactttacagatgaagaaagtaatatctggagatgttgagttgttcaaaatcacccacattttaaggatcaagagcccagtccctgttctctaacttctaatctctttcttcatcactttttctgcttcatgttgctgcatcccctttagttactaaggtactaacgttaggttgttgctatcagttaaatattaagccaggagctttaagacaatctggcccacttgaaggcatggcctgatttggacaaaacttgtggggtaggatgaatagagttaccaggcatatcttcaacctctctgtggactagtattatacatatatgagatgatgtagggtccagtgatcagttcatctttttctattgtgagcactgttggaataggaatggggggaccttttgggacccaggatatgtgattctgaaccctgaaatgtcagatgcccactaaaaggaaggggagagatggacctgtcattaccttacacattttattgtctgtatgggtatgtaaacatgtacagattataaggaattgcacttcatttctgggcttctggaaacacaggtattaagatttcatttacctccccttgttttggaaggcttattgtgtgtgtgcccatagttcttacccagttacacttaaagtatgatactttttgacagcttaagcctattgcattcctggcatgtaaaatagttattttcagaatgtaagcaaatgtggaaagcttactgcctgacatggagggttggagaagtgggattggtgttcttttgttgtaaactcatttttgtgaaatatttgctttacaacgtgaagcatgcatgatggatgaacttttagaattgaaagttatttttcatttcattcctgaaatatttaccagcatggatgttgactgagtgctttgaagagtttgcttagtcatataacttaggttttatgattttagatttaattaaacttaaagttttcctgtttgatcctcaggacttctcatctgtggcaaggctttactcacaaaggaaatatcaaccttgaagttaagcatgccctgtgtttctttatattctgatgaaaacgattgaagtttgccagtgctgtgtctgggacaatgcttagaggattcatggcttgtaggaatgagttaaaagtacaaggatattggctggcatggtgactgtcgcctgtagtcccaaaactttgagagtctgaggtcagaggattgcttgagctcaggagtttgagacaagcctgggcagcataaggagatcccatctctatgttttttaaaaaagtgaaaaacaacaacaacaacaaggtacaggggtatctgcgtttccttaggcagctgtcttatatacctttaaccttaaaaaaatccaccatttttaaaacagtgttttctgttgtttttcttagtaaatataaacaataggaactgaagtttagggcttaaaatttttgagagaataatttttatttcagtagcttttggggtacaagtggtttcttgttacttagttgaattacgtagtggtgaattctgagattttagtgcacttaagtagggtaccttgtacctaatgtctagtttttcttttaatccctagtcccctattaccctcctcctcgtgagtctctaaagtccaatatgtccctctgtgtgcctttgcttattcctaacttagttcccacttataagagagaacatacggtttttggttttccaattcctgaattactttacttagaataatggcctccagctctatccaagttgttgcaaaagacattattttgttccttgtaatggctgagtagtagtccctgatatatatatgccacatcttctttatcctctcattagtcagtggccacttaggttggttctgcatctttgcatttgtgaattgtggtcctgtaaacatatgtgtacaagtgtctttttcatacaatgacttcttttcctccgggtagatacccagtattaagattgctggatcaaatggtagatctacttttaactctttaggaaatctccataatgttttccatagaggtggtactagtttacattctgagagaataatttttgtaaaattatgtttaagctagatttggaattgggaaagaattacattctttataggaagcttttgaaaaatatatttaaaaatatataaaaatatgcataatcctaccacccacaaatgtctgtattattatgtcatttctaaaccatttttgagattatgctatagattacgttttagatcctacattttatttcttaacattaaatctcatactattttaagttctttgtacatgtaatgtttactgaatgggtaaatctgtttagggaaactggagctatgtagttgtggacttgtgcttttgttttgttttgttttgtttgtttgtacatttgctttttagaaatgtctattcagatccttggcccatttttttttttttttttttttttgagatggagtcttgctctgtcgcccagactggagtgcagtggcgcgatctcggctcactgcaagctccgcctcccgggttcacgccattctcccgcctcagcctcccgagtagctgggactacgggcgcccgccaccacgcccggctaattttgtttttgttttgtatttttagtagagatagggtttcaccatgttggccaggatggtcttgatctcctgacctcgtgatccccccgcctcggcctcccaaagtgctgggattacaggcgtgagccaccgtgcccagacagacatgtgcttttttatttggcatttctagcctgaacataggctggaagtagtgacttagagagggattgtttgccaaatatcaggtaatattttaattatttattatttattgtaatgctgtgaatcaggagtccctaacccctgggccatggactggtaccggtctgtggcgtgttaggagctttgctgcacagcagtaggtgagcaatgggtgagtgagtgttgctgcctgagccctgcctcttgtcacatcagcagggcattagatgctcataggagcgcaaaccctattgtgaaccgcatgtaagaaagtgagagctgcgttgcacactccttattagaatctaatgcctgatgatctgaggtggagcagtttcatcccgaaaccaaaccacaaaattgtctttcatcaaaccattccctggtgccagaaaggctggggaccactgctataaattgctgctgtcaagtagtgttacgcatggtggtctttaacataaaaaaaaaaggtaatgaacgtacaccacacagattagcaaaaataaggaaaggctgatctagtagttcaaacaagcaatcctcttatttaatggttctgtgattgctcgtgtaggcagaagcttaactgtaagttgttgcatttgacaggcaaatgtagctggagctggaatgtagatattagtgaaattgtgatttcagtttactggagccattcagtgggagcatgaagtgggttacatgattacacggatataaataaagcgtcctccttgccacttcactgctgttaaagtctctcctgatgttatgtggtgaaaaacaagtcaaaaacattaattctgtcaagtttccaaagatataagaatctttgaccagaaaagagacggtatttatcttcaaatttaacaaattgtgatgaaatgctgctgttacagaacctagtgtaaggtcgtggagtccattcagccagacacatgtaattttgattattaactgccgtttctgtggtcagtcggccagttttatatatttcacattataggtatttggagcaaagacagtgttgtttattgtttactttaaaaaaatacaatactgtaactacataatgagtaaatgttgatactgttgaaaactaataaaaacaaattcttacactatcaacatcacagaaattctaattgtaagaaaatattgatataatatggaaatccgttcatttatttggtgcattaattgaacaccaacactatgccaagcattgggatacaaccatgaaagaggccagcttcctgatctcacagagcttgtactttgttgggtggggcagagagcaaatcagtcaatctgtctgtctgtctgtctatctatctgtctatctatctgtctatctagatgtcaatcagtatactctgtgccacttggtggtcagtgctatgaagaaaaattaagccagtgaggagctggatagagacacagtctggaagggtatgaaggggatcagaatatgctacccccaaatatgccatttcagcaaagtactaatttgagctgaagacaatcgagaaatagcagacccaggacaagctttaccccctttttataaaaattttgctgtgtgaaggtatcctccttcccctctccatccctggagagaccactagaggtggcaccatcgcctgcagaaacaaaccttattgaaataacccttatcttctattagtttcccccatatatttaccttaccacacttcccctggaagccctaatcccctctcctttgtcttgtgacttctccacagtttattgctctttgttaaaatggtgtgtatgctctcaggcctaactgcttcttttgggtttttgcttttctgtggagctccctcctctcccctccctcatgtaaaaataataacattaaataaaatttgtgttttttcccctgcgaatctgtctcgtcagtttaattggcaaggcctcatgtgctgaacctaacagggtagagaaaaaaggtttttttccccttttctacaagtattaaacctggagagaacaatacagtgtaaaggctgtgaggtgggagcatgctggggtgttggaagaagcacatgagcttacaaacattccatcaatttgcattcattccaaaaattgtatgcaatttttcagtgacgattcccattgatcaatcatttataaaaactaatggtgagggtcttccatactcagtttactcccttcttggaaaagaatgtacattttaatcaagatgatttcatgaaagacattctgtactccaaacatttaaaagagcgtttagagtatacagcaattcatcttttcttctgtattttaaaatttaagacagggagaattattgtattatacttagttcagatttggtggtggttttgttttttggttccagtgaaaagaaattgcatcagtaacctggcggtcaaccgtgccatattgtttgtgatttattagtctggaaaaaataactgtatttctggcatatgtaaaaatagtttgctgagaggcctccttggttgtggcaatagtaatactaattaccaggtactgtatgtagctcattctatgaaccaggccttgttgaaaagtgctttcacttaattttttcttttcagcagcctgtgaggtacctactgttatccccagctgggagggagctggccagtggactgggtttaaactatgttttcattgtctttactcttaaccacttatcttctctgcctccagcaaaataagtcaaagagttcagccagtgtttcttcttggactaagcagtcagcctcctaagtaagcaagccttggaatgcaattgattggtaagatactaaagtaatcagtaaggccctcagttcctggctgccagcttctttcaccctctcctgcaggaagttctgaatgctgatatctctacttggtgtcttctctccccctcccaattccattatttccctttttctcaatcccaagtgaaggaagttctgagtgtggatgttggagtcattcagaccttggatctgagtcacaactctttcaatttactagaaatatgactgcaagaaaatgatgtaagcttccctaaaccaatttccacatctacaaagtatctaaatagattgcttaggagaaaaattgaattaaattgaataaagtgcaaagcacagaacatggccaggagtaggccctggatgaatgagggaaaaatggttctgatttttatttttgagcctctttgtaacatttgttggccccttcagaataatccttagagttcatatcagccacccttcatccctcctgggatgggccaggggagaggcccagttgcctgtgacactgcttcgtttcacatttcactgctttagcatctcaacatttcattgataacatttttgatgcctgaaaacagaataacttatttgtaattctacatacattttgtttgtgatcaagttgttagagtttgaaatgagcctcatttccttgggttttgtccctccccatctgaccttcctcttctcagtgaaccctgaagaaaaaacactagcaaaggaatctcaagaatgttggttcgggacacagctctctccatctactctcctgccctagtcctgcccctccttgtgttttcagcggtgaccaggcactggtgacagccttggctgcttggaccagctggaggtagctgcaaaatgcctgcctgctagctttgaaaaatctctgccaacctcattgaaataattgtttaccacatatcagaggggactgggaagtgggtaattgagagatctttttgaaggggtttgtggcttctccacttgcagaggcttcctgaaatggtgggtaatgctcatgcctcagggagaatcaatatccttctcctaaaacctgctcacacgtagctctaagtattagacatgcatttttgttaacattttatcagtgcatttttctacctgtgtcatttggaccttagattcgggagaaaatcactgtgtatctttggtggtttcaggtggctcttaaatttcattaattcacaaaatctgaattgaatggaatagtctgttttgggaggtttttttgggggggttggggagggattggatttttcagtccttccaagagacttcaggttttttttttgatgttctgattagcccggtgtgtgtaaggccctatcaggtgttcgcctgtgtgatcctatcacacccacatcctgtagctgcatccaagtgctttgaggccgacttaatggggattaacttaacagttgctctgtgggaacagatgctctttgccgcttatttctaataaattgattgagccatttaaaagattttttttttcttttaagttacatcttcttaagaaactgtagacaataaagcaaaactaaaatacttgggtctaaaattagtgtattatatttaaaacactgggcttcagactgattatatcatgctcttttactgactttctagtcagatgcttatttataaaaataaagcttatataaagggcagcattcaaatgttacaccagtcggttttagcagtttgaccttccacagtagctaaatattttttacactgagagaagaattctttaacattatatgctatcagcatgtcaagtgaattctgagcttgcatgcaacagatgagaccctaggtggaaacataaaaacataccagtgtgaaagagaaaagcaggctctctgtctttgggaaggagttctgcagggaggggtgtttataagtgtagtagatacttaggaaaattaatacaattattataaaagtcatctgggaaaaaccattaggtaagaatagccaataaaaaaccagaagcaaaatgtaaagatatagaaattaaaactgcacatcccatgcatagataggtcaatggggcaaactggaagtctagaaataaagttgtgcatatattggaaattagtgcaagataaaagtgtctttttacatcagaaaggggaaagatggattatttagttaatggtgttgggttatctgactgtacatagaaggaaggtgggtaattatttacccagtaccaatactggattacctagtattatgtacccagtacagtttgtcagcaacaaaaggcaaacttttttattccatgaagtgttcttacaaatcagtaagaaatactaaatatgaacatcttcagagaaaaatgaacatttttgaaaacttattatgaaaagaattaaacatacacaagagagaatagtgcgctgaatgctcagcaatgatcagctctcacccagtcttgttttatctgtattcccctttctcaacctgctcaattctcttttccctcactgggttattttgaaataatttcaattctataattttatgtataaatatttcagtgtggatgtctaacagaatctctattagacgtggacaaaaaaggcaaagaattttatagtacacaggaaaaaatacacagccaataaacctatgaagatatgctcaatctcatagtcgtcagggaaatgcaaagtaaaacagtgatataacattgttttttaaaaccctgatgggcaaagactaaaaaggcttgccagattggcattttcatctactgtcaattgataacagatatttctttgcttggagtacagtggcacagtctggactcactgcaacctctgcctcccaggttcaagtgattctcctgcctcagcctcccgagtacctgggattacaggtgtgagccaccacgcctggctcattttttgtatttttagtagaagcagggtttcaccatgttggccaggctggtctcgaattcctgacctcaagtgatctgcccactgcaggcatgagccgctgcatgcagctggtacagaaattttttagatcagtcatttagaattttatgtacatatcccttgatctaggaattctagaaactaattagttcatagtatattgtataaatgcgcacagatgaggatattatgagagcattatttgtatcaactaagcaagcctttaaaaaactcttatacagtagaatattatgctgatacattaaaagtgggcataaccatactgatgtatagaaatatctaaaatcataccgatataagtgaaaacattcagaatgcaggcataatcacagattaaacagtaatttatataaaaaacagaaaatttatatgtgtattatgtcagtagcagattcaagtgaatctgacaaaatctgactctgggcaatgagaacattggaatggaggagaaggtagtacatatttactttgtatattatcaccttttgtactatttgagtctttttaactgtacgcagatactttagagcaggggtccccaacacccagccatggacaggtactggtccatggcctgctaggaaccgggccacacagcaggaggtgagtggcaggcaggtgagccagtgagcattactgcctgagtgctgcttcctggcagtagattctcacaggagcacaaaacctattgtgaactaaacatgggagggatccaggttgcctggtccagtccttgtgagaatctaactaatgtctgatgatctgaggtggaagagtttcatcccaaaaccatcccatcccatccagtctcatgccatcccacccccaacaccccatggataaatggtcttccacaaaaccagtccctggtgccaaaaaggttagagatcactgccttagaggctgctccctcttggcacatcttgaatgtaggactccttggttctgccattcctggtaggtagtcagccagcttttgatagttctccccagagacttcatcccacaggcaagccatcccattccacgtaaaacatctctaatgttaggaaggcacgtattttgatgtgatatctagaatcctcccagctgttcttcagaggaacattacttttataaagttgaaaagaacgttttattgtattataaaactaggtcatttcagtgaatttcatctattttcatgggtaactgattcttatatcaaaacttgcttttgaaagtactggaagcataaattattacttcaggcccatttgctttactttgttcagcacattgaacatcaaggagcaactccctcgatctaaaatttctagcattggtgcttgtaatatcatttttcaagttgacattaatgctatctttggaattctcatggtaagtcagaagaaagcagtttagtggaactgttctttctcccactgaattgtatactgagatctgttatattttctgcattttaacccagaaagttgttcaagagaattgaccatgataagacatctgtagcttattttgtatttttttaatggaaaattgtaactgacttttaaatttaagattgagtgtagcctttcccaaaccaatagctaatgtttttataactatttagtgtaggagattataataaaatccacattgcttaagatataaaatgtttgtgcagtaataggctgtataaaaacagtaaattgagattgtatcaggaataatgtattataaaccatatatgaaaccaggtactaacttggtattctgcatagctttatcagaaaggcagagcaaatactatctcaaaatgaagtataaacaaaatgaggttcagtgagtgatgtggtttggctccatccccacctggatctcatcttgaattgtagtccccataatccccatgtgtagtgggagggaccaggtggagataactgaatcatagaggcggtttcccccatcctgttctggtaatagtgagttagttctcacgagaactgatcactttataagggacttttccccccttttgcttggcacttcttcttcctgccaccatgtgaagaaggacgtgtttgcctccccgtctaccctaattgtaaggttcctgaggcctccccagccatgctgaactgtgagtcagttcaacctgtttcttttataaattactgagtcttggatatgtcttcattagcagcgtgagatcagattaatacagggaggctacataatttgacccaagtagcaataaacaataggggtgaggttgaaatccaggcccctggtacttatggccttaagctaagtgaaataagccagacacagaaaaacaaatactgcatgatttcatttatatgtggaacctaaaacactcaaactcatggaaacaagagtagaagggtggtgttaccagggtttggatgtgggggaagtgaggcgatgttggtcaaagggtgcaaacttgcagttatgagattaatacctaatgtacagcctagtgactagttaataatagtgaattgtacacttgaaaacgtctgcgagagtaaatgttaaatattcttaccacacagaacaaaaaaagtaactctgaggtgatggatatgttaattagcttgattgtgataatcatttcacagtgtatacatatatcaaaacatcacgttgtatacattgaatatacataatttttgtcaattatacttcagtaaagctagggaagaataaaagaagtgacctaaccaggacacctatctgtagctctatggtaaagccaaaagggataataacttttgattatcaaaacttcatcatcattattattttttaagactgggtcttgctatgttacttaggctggtctcaaactcctaggctaagtgatcctcctgccttggcctcccgacatattaggattataggcatgagccatcacacccagccagttttgaaggtatctttattacatttttttgtttaaatatttaatagtaagtgtttaacttgaagcatttttttctgccttaaaattgattttcccactcattttatggatcaaaactattatcagattttaattcccactccaccacattgtttataaaagttgacaattatggaaagtaaagtaatactgaatttttctaatgcctatctttgacatggaataaagattataaaatttcttataacttgaatgagtttttaaaaattggacatctttttataaaaatctagcattgaccatttcaacataagttttacttatctctgaaatacaggtagtacctatttttattaattttcttaagtgatgctgagtgacactatttttgttttttttcactttttctttactttttttttgagacaggatctcagtctgctgccaaggctagagtgcagtggtgtggtcttagctcactgcagcctcggcttcctgggctcaagcgatgctgccacctcagcctcctgagtagctgggactacaggtttgcaccaccaggcccagcagttttaaagattttttgtagagatggggtcttgctgtgttgcccagactggtcttgaactcctggcctcaggcgagcctccgacctctatctcccaaagtgctggaattatagacatcaaccaccgtgcctggccccagtgacactgtcttaattttgaatagggaagtatctaatggtattaaaatggtctggcagagaaggggatatgaggcttggtgaaaataagcacaggatgcaccatctttgagtaagtgttagtttctgcagtgagccagcagcaacattcttagcagagcctagaaagatcgagtgagggctgtgtggtggtgcagcctcttaagtctctctggttccacaacatgctcagattggtggctttgatattttctccatccaggacgcattgtgctaagcttagggaaggtccagtggatatttaccaagcctcttatactgccccgcatgttgccatgagacagcagcgttatcaccttaaatggtgcaaatactccttgtgcataccctacccctgagatctaacatctggattctggatactgtttcctattcttccatcttgctgcatggttcccaggttatgtatatagtgtggctaggcaccacacatggccctggctccttgcagccatacagaggtgacctaactggatgtaattgggtatgtaccgggtgttggctacctgtgcaggttgagggccttccacaggtctagcaaagcaattcattgcctttctgaatttttgaatgcttcatttgtgaaacccttgatgtaataactgttgatattatttctttttgaaaactccccttactcttccctgtttcttcatttgtaaactggaaccgatagaaaagtaccaaacttagggttgttgtgaggcgtaaaagaaataatacagcccagagaacatagtatatactcagcaagtatttattaatatgactactaagccagcattggtgattgattggctcatagtgtcttctatttgccagatgttttcagaggctctgttcatgttcatacccatgtttgtaaatgacagaatgtaaatttcttaatcctctgtcttctcctttagcatcagctcttgtccccaaagtaaaagaactcagtcatccagaacccagttttgtagatctatttttcaaaattgggcagttaatagaaaattaaaagcagtctagggaaaagcctttcctttgggtttgttgctttcttttctgtcataataagactgtgcccaaactgtagggaaaaatcaagaaactgtaaaatacatcatcagggtgtttatagtaaatgtaaaacgttaagtaacatttgagttaatctgtgcttgtacaaacctcagaagcttaaataatgaaccaatgacatataatttagaaagttttcattagactctttgcgttggtatttgcaatatcagatttgcatgtcatcattattagccttcctctattttgagtgttgactaggtgccaggcgtcatgttgagaaatttatgtgcttatttaattctcacactgactccatgagatagatactccattttacagatgaggaccccacatcataaccttttggccagaattacagttagtgttagaatttaaacctatgcagtctcattccaaatcctctgtctttactcctccagaatgctccattaaatgaattgtttcttataatccggttgttttaacgttggaaaagaacttgagaacatttagcccaaccaccctatgaagtttggcagtacttcttgccattctttcaatagataatttatttgagtttaagggagagtctatgaattaacactagtaccaaaactcccatgagaaaataatgtagacagcttttgttaaaaaagcagaatttttaaaggtgttcattcagttatcttcttgcctaacaagttcctgtgttgtgatagactttgaatttgttaaatatgaattggcttcctgattctagctgttttgccagaggcctgatttagagaagggattaaaccactggtcaaccttggatggaatttgggccagcagttccttctccacagcccctgacacttggctttgtgccaagaaaatcctacaaaaggaaattgatttactctacccaagacagagttccggaggctttggttgtccattgttagcttagaagttggcgcagtgtgcgtgtgatccacgcctaaatagcacagccttgctgtgcgtggtagaagttgggttagtgttgacatgctgttgactcaccctcccgaggatggaagctctggcctgggtcaagttgtggtcactgcagttaacagtttgttgatctcagggagtattccacagttgctgatgtaattgacaatgattggagccagctcttccccagattcaaatggaccaattagaggacttgttggttctgtttatcaactatgtaagtgagtactgtgaagttggcattgtttttagtctgtatttgggtaagatgaaactctgttctcagacagtaatatctttcaaaagtacaatgttacttattgtgaccaaagtagggatgaagtttgcaaattatttggtgtaatgatttaatttggccatccatgcagtgcagttctctaccagtgtgattgttctctttgtaaaatactcttactttgccagaaaattgtttgtttgtttgtttgtttgtttgtttgtttgtttgttttgagacggagtctcgctctgttgccaggctggagtgcagtggcccgatattggctcactgcatccttcaagcaattctcctccctcagcctcctgagtagctgggactacaggtgtgtgccaccacgtccagctaatttctgtatttttaatagagacgaggtttcatcatgttggccaggatggtcttgatctcttgacctcgtgatctgcctgcctcggcctcctaaagtgctgggatacaggcgtgagccactgagccctgttgaaaattcttattaataagatgtttctcatagaatgtttcaaaaaattgtgactggtttcaaaatcagatgatttgcaagaattagccatagtataaacacatagttctcaaaccgttttctgggagtgggcccagagatctatttaacaaaaccttgagtagagtctggtgcaagttaaaattggagaaccactaatgtaaccttaccttatctgtggaccacattttgagctttggaagaaataaccctttctatccttcacaaggtaacagatgatttttttgcacaattatttgataatgagcttatatttgagattaaggtatgcacacgataatgtacattctcactctaggtctggggaccttgattctttgactcttctgtccttttctctccagttacttggttttgtgcattaacaaacttttcaatttacttatttttttttacttatttacttatttctcatcccttacgtaatgttgcatcattgttttttgtagcctctgcagttcaagatactaatcacccctttctaccacattaaaatacagactctacctaaaatcatgtatgggagtaacttgatatatacgaaagtgtaaccgtgtcacaattccccgccccaccccgccagtctacataaaactgcaaacactttattgcttaccaagaaagtagacaataatatcgaagaaagccctccttttcctcttctttgaccaacaagggagcagttcctgacaaatgtcagtttgctttttgagttccttaggtttctgtgttgtgtttgcaatggataaatattgagtaacaggtactgactgtattgtatacattgaaaactatccaccaacagaatatttgcaggaggattttgttttgttttgttttgttttgttttgttttgttttctgagacaggctatctctctgtcacccaggatggagtgccatggagtcatcatggcttactgtagccttaacctccttgtctcaagcgatcctcccgcctcagcctcctaagtagctaggactacaggagaggaacaccatgcctggctaatttttttttttttttttgtagagacagagtttcgctgtgttggccaggctagtgttgaactcctgggctcaagaaatctcccaaagtgctgggattataggcatcagccactgtgcctggcttgagaatgacattctataagtagtttcagtcccttagtttaatcccatattttgatcctataacatgtacaatatttgtgtatagtatatgatctgccaactctctaagaagattttaaaacttattatgttaaatttcagacatatacatcatccagcttcaaaaattgaccacattttgctgttcttgtttcagcacctccccctgccccattttcttttctgaagcattttaaaataattctcaggtatcatatcattttacttctgttcataggtttctgaaaggatttgatgcagaatgttattattaaaccagtatacagagagaaaggccactggatattagtacatgttttggtttcagacggtccttttaagagtatattaaatcacataaggattttctgagtacccattagaaccacaaaaaatacctatgatacccttcttactgcagtagaagatgagtttcctagggtagccctttgttgatggaacaaacatgtattttgtttcatcaggaaaatcattggaacagccatgactcagatccactaaatgaaggaacaaaaataggacctgcctcacctcctgatttttttttaaatctctaggatgagtaaccagaatatttttatgttgtgctaagtaggtttgtttgtttgttttttactctgacttatattatttgaattgtagaaatatattgtttttacttttttctttaaaattctatctggagtttctaaatgagagattgtagctcctaaaacctttcttagttttggtgtcttgctttctgttcttagcgtctgtggtcatttctaactcccagtgaggaaagagctctctggtcttgtttctttgttaaatgaaggagcaaacctccgtctcgttgatccactcccaacccacttgttttgtaacaatgaaagttatctcatacttaaaagacaacttgaaattataacacacctgtaacaaagtaaagggtatgggtttttacttaggtttaaaaaaagggcagtaacccttttcataaaaaagcaaaatttagatgggatagaacccccgtttatagaaaagattttaaaatctcatttgctctcattgaaaccttaaccttctctcaaatactggcgcacctctgaggaacttcaaatacggtttgaaaactaatggtttaaggagggccaggcgcagtggctcatgcctgtaaccccagcactttgggaggccgaggtgggcggatcacttgatgttagcctgggcaacatggccaaatgctgtctctactgaaaataggaaaaattagctgggtgtggtggcgcatgcctgtagtcccagctactcaggaggcggaggtggaggcgggaggatctcttgaacccaggaggcataggtgcagtgagcagagatggatctcttgaacccaggaggcataggtgcagtgagcagagatcgcgccactgcactccagcctgggtgacattgagactgtctcaaaaaggaagacgaatggtctaaggaaactagtttgtggtttctcagcggagaatgacattctagtttctacagatctggcaacagaagacaggcacataaactggcctgctttggagtcagggccaagacttaaatccagatttaaaaccagctttttttttttcttcttctaaaacaaccaacctgtgttttaggtccagtgtctgccttgtaagttgctcaaagctcagatacaaggaagtaatcagcacacatttttgtgataacattcctgaaaagaaaaagatgaggtggactaaggtaaatacactgctccttaaaaatccatatttttagattatttataaatcaaatgggcatggttaccaaagatgaattctagaggtgtaaaactccagtcttatacctcaaatttcagttttccttagggagcaaaacacttccatgatcttactgaggacctaaaaaagcctgtacatattttaaaaatagcactccctagataaagcctgatggatccagggtacagtagaatcatgaaattgcctgtttctttttaaaagatgtatatgattgctcggtggctgtatattgtccatcgtgtgcgtgcctgtgtggtatgttggttctttcagagaggcagtggcgtgcagagtgagaggatcacagatgtgtatgtgacaaaactatttcttttctttcttttcttttctttctttctttctttctttctttctttcttttctttcttttcttttcttttcttttcttttttcttttttgagacagagtctcactctgttgcccaggctggagtgcaatggtgtgatcttggcttactgcaacctctgcctcctgggttcaagcgattctcctgcctcagcctcctgagtagctggattacaggtgtgcaccacgatgcctggctaatttttgtatttttagtagaggcagggtttcactgtgttgttcaggctggtctcgaacttctgacctcgtgatccgcctgcctcggccacccagcgtgctgggattacaggtgtgagccaccgtgcctggctgacaaaactatttctaaaacacaagtccagatattcctaccaagggctctctggggcttcgttttgatttatatgcaaaacactcctaatgtggtgacattggggagataaagatctgggatgatgagagagaaaggcaggtaggacacatgcccttccagtaactttccagctagggcttgcatttaacctctgatggaggcctcaccatccaggcagatgtacttgcttaggaatgagtttgagataataaggctaaatgtgctgccttctgtatataatttgcatttgtcctaatgtacgactaaggaaatgaaaaatcaaagtttgagtgactaaaataaaagaggtctgtggagtaattggattgaatttgcaccaagtcaaggagaaaacttctgtattttgtatgttttgtcatggttctatgattacttgttagaaagtgatataaaattcaataacttagtttgatatgaacttggctatctttaagttatagaagtcgtgcatataatgtggctgttttcaacccccataccctttctgagtggttggagatgtcttgaatttcgaagtgagaaggtctggtgctgttacatagataatcatgttagccagctttaccttctgataagctctcaatttaagaaagtacttctaatcctggctttatctttggcttgctatcttattatgcacagagcataattgtaagaagggaataatatctcttgctgtctattcactaagaatagtgtgaggacagggctcttaaaaacatgaagagatgggcactattgtatagatatagagatttgatgaaatgttaaaatgttggatgattttaaatgacaagtggagtggtgagaagtttatttttaaccttatgtggataccttggatatttagaaacatcgaagttttaaggaagaacaaatatcttgactccaagaaaatggtcatgtgatactgtggcatctatttggtcttcctgatgtatatgtttcctgacatttagctcctaaaatccttggaatctccagtgctaagaaggtcttatatgctaatgagatgactggtggctgggtaacctaccatgtgattagagggttaggactttcagtcaccctccccaacctccaggagctgaagtttgagttgataaactaatgatcaatgatacctacataatgaagctttcttaacaaccctgaaggaccgcgttctgggaacttccagatagctgaacacatggaggttcctggagggttggatgtcaggaaagggcatggaatctcgttttctcttcagccgcacctcaccccgtgcatctcttccatctggctgttcatctgtgtgtcctttgtaatatcctttaaaataaatgggtgaatgtaagcaagtatttctcttagttctctgaaggtgctccagcaatgaatcaaaacgaagtaaggggtctggggaatggtagccagttggtcagaagcacaggctacaacctggggcttgtgattgacatctgaagttgggggagttttgtggtactgagccctcagcctgtgggatgtgtaatctccaagtacagtgtcagaatccagttgaattagaggacactcagctggcatccattattggcatgcagtattccttgtcatgagcctgggcaacatagggagacctcatctctacaaatatagctgggagtggtggtgtgcacctgtggttccagctactcaggaggctgagtgggaagatcgcttgagtccaggaggcaaacattgcttctcctccaaatgctgtactttaacatgtttggaaactcctgcaaaggaatttcaacataagcgaagtcaatgggttataaaggactgaatgccattttgtaaatgtcagaaatcaaagtcacaaccaagttaagttctagattagggccaggaagagaaatgtattatctggtcaaccatatcaaatctgtattttggtggaagagcattttcttatattggttctgattggtttgatacggacagggaactgttttctttattccagttatttgttttgttttgtttctgagacagagtctcgctctgtcgcccaggctggagtgcagtggtgcgatctcggctcactgcaacctctgcccctcaggttcaagcgattctcctgcctcagcctcccgagtagctgggattacaagcgtgctgtagtttttgtatttttagtagagatgaggtttcaccatcttggccaggctggtcttcaactcctgacctcatgatcccacccgcctcggcctcccaaagtgctgggattacaggcatgagccaccgcgcccggcctattctagttgttaatcagttaacatagccaaaagatatagaataagattgtagactgaatccatagtctaatgatttgtcttcctagtaattgtgaataattcagacattcaaaattagtctggcatcatacaaacattagactagtcctaaaatgaggatattggcaagtgtgttaataaaaattgcatatgcagtattaataggttccttacgtaggctgccgattactcaggaactgtcagatgttttgttttgttttgtctttgagagatggggcagggttttactctgctggagtgcagtggcacaatcttggctgactgcagccttgacctgctgggctcaagcgatcctccctccacagcctcctaagtagctgggactacaggcatgcaccaccatgcccagctaatttttgtatctttttttagagacggggttttgccatgttgcccaggctggtctccaactcctgagctcagggatctacccacccatgcctccctaagtgctgtgattacaggcatgagccactgtgcccagcccccagatttttaatcttctctttgacattgagtttcagaaatgaagtataaatggtgaatttttagtgtagaatatgatgcactaggaagatcacttacccgtttattcactttcttagaccatgtcaacccgattctgaatttagggttctgttgtgatggtgttctttagaagtgattttaacactcaaaatactatagtctgtaacataatttactgattttttaatttttgcaaactaagttgaagtaatcaagtatttatgagttctttgggtgagaccatctgtcaaagaattctgggcttaatggagatacatatatgttgtgaatactaaacagatatccaagtaataaagcagaaatcatatgctgtgtaacagaaatgtaaagttctgaattagttcacgagtaggagagaaacttttttttaaaggtagaggagaactaaaagtaatttcttaaaagagtgcctattttacatcttgaatattaaaagtctaattcagtgccttgggatcttgttctttttgtagattttgatttgaatgaacttcagtttgctgaaatgtctaatgggtgcaaagtacagatttaattataaggttgagctaaaatcagaatttaagcatatggcatatataataccaatttaatctttcccccttaaatttagttatttttagtgagtcccaaacaccatatttgagacatcacttttttcttttttaaagagatagggtctccctatgtgaggctggagtgcagtagctattcacaggctcgatcatagcaaactacagccttgaactcctggccccagtgagtgtaatgtctcaccatgccaaagtacttttatcttaaattgcttatttttttgtttatttttttaactgactctgtttacaaaattaaccttttatctagtgacagctagattgtatcacatttgtcatctatggacaactgatttttagttgtttaatatggtaagtttattattgtttttccttatttaagaaaacaggatctgagtgaaaaaaaaaaaaatcttaattcaactatcacgattccagtaggaagtagacagacattcatctgtatacattaggtgtcaaagtagagttttgtggtttatcattctgaagatttgagattcaagacatgactatctttcagtcatattgtgcaatagataacatataatgtttctcactgatgagaacagttggttagatctctcagatgacttgaattaggtattagttcaagtcagttgtcagtaagtttggctttatcgttcagaggagcttcttatgactggacatttctcaagtattgccgtattggtcatttggctatcaatgcttaaattatactcagtatagtataaattttcttatttcccttatttaagcatgcctccattacactgttgttgtctctaataagagtttaataatctttgttttggcttagtaaaaagagccaacaaatatatgagtgactgactgagtgtattgctctatgcgcaattgtcttaaaggaaaaacgtttatagaatcactgtgaacaataaaatggttgcatttcgctggaaaacctcggtgctcctttggtaaataatgaagtgttttgttttacgggccttttcactacttcattgacaacagacctttttttttaaattaattaattaatttatttatttatttatttattttttgaggtggcgtttcgctcttgttacctgggccggagtgcagtggtgcgatcttggctcaccgcaacctccgcctcctgggttcaagcgattctcctgcctcagcctcctgagtagctgggattacgggtgagtgccaccacgcccagctaattttatatttttagtagagaaggggtttctccatgttggtcaggctggtctcgaactcccgacctcacgtgatccacctgcctcggcctcccaaagtgctgggattacaggcgggagccactgcatctgaccaacaacatatatttatattacccagtaataggcatagtctaaggaagataatagaatttattcttagtagtgaactctttggcttttgaagcagaatttttttttctttgttcttttctgtgatagtaaggaaggaaggaagggaaggctactactaaaaatataaattgctaaatagaagtcaagtctctgggtgttgaagctcacatattggtgctgtccagacctgacgcatctagaaacaggaatttgcccttagcgtaagcttagccaaatggttgagtcatttctaagtattttaacattatagaatgccttaggaaatgtcatgaatatctaaaacaggtcttcttgaggattttattagtttcttaaaacatggaaaggaacttgattctcagtgctggtacctaaaattcaaagacattagttgtgagttgctgtgctcctcagctctaagccacagttgtcatggccaagcctgtctccttatggagagtggccttgctgtttcctgcagagcttctcttgtgcctggcttgtgcctggaagtcagcgtgtcaccacttcagagagacactatagaagcttggtgatcttcaaacaagaacttaaaacaaagaagttttctttcacagatatcttaaaacttgtagctaaataaaacgtgaataactgtgagagcctcattacagcaatttttaaaaaagcagtacatgttttgttgtatcttaaacatcacagaatggtattgtgtgtccagttttgtttgtaaaatgtaaccttcgtgtgaatgaccatctattcctttctttttggaaggttagtttgtcagctgttgtgtgatgctcaacattttatgtaatgacatttagcacaacgtttcaatataacatctcaggaaaacatttaagaaatagtgaagttctctgggtattacattaatcatattaattacctgttgcttttaatttatcaccgtatcaccctaatatcacaaggcatgtgtagtactattttgtaaagattttctaaagaccttccctctataggaaggaaaatttaattcagaaattgggctgaactctctttcacttgtgtgaaaatgggaaaattagaagtaatttgtattttttattgtgaaatcagtgtaggaacctgtgctcgtatcatggaaacaacagcactaatgtttttctcccctcgggtgtgggctttgctgcagatatccatgtcttctactttttctgttcttagttcttattcacttattgtctatacttcgtgtcactttattgaatttcacaaatgcaatttaggaatccagggatgtgataaaatttgtgcatctgcttgtcattagccatctcacgtttatatcgctaagtgaaaatttaacttagtttggaacaaaccaccatgatttagttcacctgtatagtttaaaagacctaagacctgaaatttttttttttttttgaaacggagtctcactctgtcacccaggctggaatacatggtgtgatctcagctcactgcaacctctgcctcccgggttcaagcaattctctgcttcagcctcctgagtagctgggattacaggcagctgccaccacgcatggctaatttttgtatttttagtagagacggggtttcaccatcttggccaggctggtcttgaactcctaacctcatgatccacctgcctcggcttcccaaagtgctgggattacaggcgtgagccatggtgcctgtccaagacctggaattttacactgcattgggaccttataaaattcttgacttgtacccttttggcattttctgaatgctcatgatttgcttctgaaatattttaggcctttggaaacactccttcattctaatcctctcttttcttgctctcaattcttcatgtcatgtaattattttgcctagagccaaatctgatgtgttattataatcatcatttctgcaggagcttggtaacactcctgcttttgttccctttaaggcttcttttggttttgtttattttgtttcactcagaatgatctggttaagttttgcttgatcatccatttcaaatctcttagtacatttttcaaattcagttccaagcatgttaaatgtgtcacaatggaagtggcccacggtcaaatacattttgggaaaccttggttttaaaaaagttaaactgacttcattattacggttttttttttcaaaagcctccagtatccatcttgaatgatccatttcccatatgtgttttatgacagaattctccccactcccaggtaataactgttgacattttctgaaaactgtttttgagaacactgaattagatatgaaatgaggcatttattcatacttcgaaacgaatgtcttaaacctcactgggccattttgagtatacattactagtgatatatttaataacttagtggtataagcatgcaataacaaatttcttacacaagagaagttctgtgtagaaacaaatttaatactgtggctaaagaaatgaaccaaaaaaatttaatatcttgaaatttgcttcttagctctgtttagaatcattgtgattcacggatagtaaattgtcagagtggacttcatgaaccttatatcagacattctgaaaagagctaaaattgccattaaactgcatgagttaaaatatcttagatagtttaaaaatactatgtagacttggtgagtcagatctgccacactgagcgtgtagctggggttgacgacacacgtgttgcagtgtcgttaccagtttgtctcttttagagacaacttggcaggcagacgtcttgcagataaacaaggaaagattgtctattttaaatggcataagacattctttaaaccagtgtgtcatatgtggttatatagtcagcattttctttagtgcaggaaatcctctctcagggttcctgaataaatagcaggtatctttgtagggatagctcgcaggagatttcaaatgctgtgtattcatcagttcaggctccccagatgtcttacgaacgtgctcattttagttttcttttcttttccctcttcctgctagatacaagttgagacaatatgattagctcttaaagtgcttactctccattttatgtatattactgcattttaatcctcataatatcctgtgaggtgggatgttactatgtccatttgagagataaaggaaatcaagaggtaaagttaactggctttctccaaacagctggtaattactaaatacagaattgacttttgccttttgattccaaagatcatattggtactttcatgtgtgggtcccttcagccagttcctacagtgaccctgacccagctgtaagtcccctgaggtctctagagatatagacagtgatggattagaccctgttcatagttgcagatacaagacatagagaggtttctagcaataatttttttagttatatattttcatagggcttttgatttatgtaacctattagtatatatttgttattccagtagagttaatacattattcaaagagattccagtttttaagccttttctccgtttgtctaagttgttcattatgaaatgattggctagaatttgaaagtctttacctacagagagattctgactggcttgcttggtcttggaaccctagttatgagtgcattgtcttgcttcctggtgaactttgcccagaaatagttaccacctcattttttttttttaaatgaaagctggataattaaccctcaagatttcttaattaaaagattactattataaattgacccacagggagttaatacaataaaattatttttgatcattttatatgaaataattatggggcaatcttctgtaatcttgagttgaaggggttatcttgcttaatgttaataacttttgatacaccaactaccttttaaaaattaacgttttttttttttgcttctgtggaagggaggctgtattttgtaggatttacagtttacatagttattgttttatatgatgtcagttggattaattatgttttgagtggaaactctgtttggttcaaccaatatttgaatgctaattttgttctgtgaacaaatagaaatacagagaacagtaagacatgactctttccccctaagtaaaggcttaggttggagttttcaacctgggaattactgacattttgagccaaataattgtttatgttgggtgggggagggcctacagcggaggctgcctgtacattgtaggatgtttagtaacatccctagcttctacctactagatagatgccagtagcaccacccaagtcgtgacaatcatctttgccaagaactttgaacctctacctagaaacagttcatagggctcaaaaagcaaagtggcctaggacccatgtagttaacaagcttaccctgttggagaaccactgcatagctgaacaacatgggtgagactagtgtcagggtaaaggagctcttgactggagattggccgtacacagaaaacaaagtgagtgttatggatatttggggatttaccttcattagggcacagttggttagcgttaggtgtacaccaacattattccctctttagaaacagccatgcacgtaacattttagcacatctgaagaggcacttctattctaattacctaaaattcttattatctagaattacatgctatgaacaacagcagtaaagtcagaagccagaatctatgtgatgttatctgttttgcgatcacagttgtgttcttctcttagtttatttgaacaagtttgtgaaaaaatttttgtgcttatgtaaatactctttgcttagattttttggtagaatgtaaatctttcccacacagtgcaatacccctcctgcccaagggcgagatatagattgtacagtttgttatttctgtgttttagggcttattcctctgtagacatgtcaaaaagacatccgtcgggggtaaggaatgcattagcaattcaagctgataatctgcatggtgagagtccagataattttttccccaggtcacataggcagctctgcacaagtctgttaaacatatgctagttttgaaaattaaaataagttcccatcactcaaggcaatgaaacgtagatgaattgctctgccagattgactcttagaactcctgatgtgatgtggggctagacagaatgggatgtttgctaataaatcagggaggtagtgattgttttccttctttttctcccccacccccgtcaggacaaactcacattctgtagcctggtgcactctaataatgcctgttgaccttggccatgaaagcactctagactcaccccctaaacaccgcaccgaatgtgctcatccttgaaatttacaagccttagaatcttccctacctccactcctgtttactgcctcctgttactcctggtgcttccagtcagaccgtagtcttggctgtgcagtacctttaggagccctcaaaaatgtttaatttcttttaaaatcagaaggaaaaataaagaacaagataataatcatgaatatacaataatgaatccagcctgacttagagttgtctttataccaatcaacagagccctaaaatatagcttttaatgtttttttaagagagaaagaggcccacgaaagttgtcctggggcccccgcatcctcctcatacactggtgggatgctgctcttgcttgctttggaatgtggcagcagctcccagtgacttcacacgtttattacaaattcaaggtcatttggacgctagccttgtgctacctttcatgcttcctgtccgacccatactcagcctgggcatgttttctgctctgatctttggtctgccttccttctccttctccaagtcaaaccagtcactctttcctgagagctcttcggtgtacccttgccagacctctgcattaacactccagcacctttggttagccaatttggccttatttgtgtctccaccattggattatctgtccatcaaggtcaggaatgttttcgggttaccccactgtccccaactttgaatatgttcactgcctggaaaatgtttatctgaatataaggcatcaagccagaacttgcccaaaacttaacctaggactcaaacagctttgaaatcttatctgtgtagagtgggaacggcatgtgtttgataaccatcagcatttgctgttttgcttagccatcaacaatccgtttctatctcttcctcatagtattttcagctgtatttttgtacagcagtcattcacgttaggtgttaggttacactgaaatctctgacaaccagttctgtgctactgaaggcttttagcagcaggattaaaaaaatagttgattgcacattcgaagtctcactgctcacactgtttatgtaattcttggagtccagttagatcatctgatttttaaaatgttgcctgaattacaaaggagttcaggaatgtgttatcaaagaattaggaaattaacattgaaatttattgagcaacatagctaataggttgtcttgctttttaagccttcttgttttctaggaggagcctgaagtccgtggacaagttgaactgtagctggtatttaggaattggtaaagacagaggtgtggatgctatgttttcttttctctgttaggaaattactctcctggtgccacaataaaaaatttcacaggtatctaaagtggaatttattttgtattgttccacacctttgtcaataattacattttctaccttctagtttattactgttattatttttcatgccaggtgtttcttaattgttggcataagtatttattgaatgcttatatgtgggagtgagagagtcaggccagtgctaaagagtagggaataacccctagacagtgaagtaacttttgtcttgtttgcacattaaaaaaaaaaaaagattaggaatccttgctctatatactagaaatgtttgatgttctcttttcttctcttcaaacagagaaaacttagatgaatacttataggctctactgtcaactaactgcaccctcctaatattggcgtctgcatatttttaccattgtcaatatcagattgcctctgatgttgtgtcactgaaactgatagtaacattacatccaagagtaagactgcagtgtgatttttggctcttggtcttctgttctttcggcaacaattttttataaatatagtcaagaaaatagaaataagagtcttcactgctacctccccttcagaattattttctcctagtattgtggttcctgatagcctttattcctatagaaatggcaattcgaaaaattccttctgtgaatctgagggctctacaaagggagagcttctttgatagtgctttggtgtaagttatttaagaaggacaatctacccaggcttatcaagcaaataacctggaatttaaacctggagtattctttagtgttccaagtctgcaggaaaagaagtaatcttggcttaaactaaataagttaacagaatacaatttgaacaatgaacaagaatgctgtttgaaaattatcttgggtttttatgtcaagttaatattctcactgaatttctattatgtttgtaaagcagctttctcctagaccaaaaatcctagtaataaaaccacaacagtatgagagttataagcacacagtaaaggctgatgagtaaatgttatgacactttgaaaggaaataaaccagacgatataatgtaaatatcctttgtgcttatcaaaaataagtgacttcatgttctgttcctgcaatatttctgtaaatctgctaaaaatagaaaggtaaaggtctaagatcataaatctctgatgccctttccttaaaagtaaggaattcttgtcttggattcttatataatatacttatttataatctcacttgttctgattgcaggtggcctcttactatctttacatccatgtgaatgtgtgtgctttgatgtgtacatatgagagacaagaacaaaagtaaatgtcaaatatccgaattcctgtttcagtgagctttcacggagtaaattctttttgtctacttgcctgtgatctcttctaatatgacttgcgttaatgacctttaagaaatcttttaataaaataaaaaattttattaaaatcttttaataaaaaaattttattaaaatcttctaataaaaaattttattaaaatcttcttcatacgtgttacttgaatttactcatggcaaggaccagttagtaccattttatgaaatcacaagctcatgggcttgtgataaaacatataagtgctttaaatttggcattggtaacggcaggccgactcacttgaaaaatgctctgaactgctctgcctcatgctggtgggaagtcagatggaaatgactttctagagagtttagctggcctccaagcttagtgggtactcactctccttatcccccgatagctgctctgagattttaatgcacattgaagacaatatgataacttaacctggaaaattagcattttggtaagggtctttaacttcattagtattttcataccactttggtattagaaattgtaaagatattaaagggtatggacaatgtggaatgtatgtaccagactcagcagtgtatactgactccctcactatagcccagaactggaaatcccgctaactacctctccccatcctagcctgaattgccctctccacctatgttggttttacaatggcctgacgcctgaaagctggtagaaactgtataggaaaatagggttgggataaatttctgggctgacaaaggatagaggaatatgcttctttttccccttgtccaagtatatcagcaactctaagatgcagatttatcagtatggctctactgggcatgttctagttaaatggtagacccactacctcttctggaatcttgttttccattatattcccacctgcagcttttcaaagacttattctcttctctaatggtctcttggttcttttttttgcccatgctctacgttccgagtgggtcaacattgcagtgggtcaatgagaagaaatagaggggaaaaataaaagaaccagaaagaaacctgttaagtttgcacttacttgtgcattaagcatattagcgtaagccttaaactctagaaaactcactgtagtgctgtaaagtaccactgataaagtaaaagttcatttttatgctgtgtcgttatttagtgatgaatatgatattgcataaaagatgaggatctgtaaggccaggcgcggtggctcacgaggtcaggagttcgagatcagcctgaccaacatgatgaaaccccatctctactaaaaatacaaaaattagccgggtgtggtgacgcgcgcctgtaatcccagctactcaggaggctgaggcaggagaatcgcttgaaccagggaagtggaggttgcagtgagctgagatcacgctactgcactccagcctgggcgacagagtgagactccgtctccaaaaaaaaaagatgaggatctgtgtataactgccaggtgttgtgtgaggtaccatgaataacctggcaatatcctaactgtgcaggtatgaggagtgacccccaggaatataattgcaattaaacttgcaaattatgtggggatactctatttcagggcaataaaataaattatgtctagagctcataactcttacacatatttggctaggtctatgcagcaaaacccaggtgataactgaggctttaactttgggatttgtttggtgctgactctgccacatggtgaaatttggtaggatctcagtgcgagtgtcacatgatcagtctgcttgacccaacatgccagaattccatttctcagcccactctcttctctgcatacatacctacctcccggagagggctgggcgggagcctacgtgtggcaagagccctcactgcttttgttacacagatttcaacacatatggcttgatggagtgtgattgcagtagcatgaatgtttggtgatgaaatttgcatgtcctttgctgggagaagtataattataagatttttgtattcacatagccacatgtgaggtatgagcaggaacggggtctatttaatagcattagattgctttcagatttgaaatatttccttttagaaatatattgtgtaaacaaaatatgtttaattttttttaaaaactatgcctttgtacaaattgtttatcatttgcagaggtctaaaaaatgtaggagaaaagaagctcacaaaatcaatcagatctaaagattgcaaagattgattaccatctccttaaaagcttcagtacatgtgtttacagtatcattctatttgcctctgctcagattctttccaattctaggacaacccaaagtgtatagatcataagccataactgatcctaccttacataatacattaaatataaaatatttatggccaggcatggtgaccagttctgtaatcccagcactttaggagaccaaggcaggaggaacacttgaggccaggaagttgagaccagcctcggcaacatactgagaccttgtctctacagaaaaattagccaggtatggtggtatgggcctgtactcccagctgcctaaaaaaaggcaacttgagaaagtttctaccttctgaaacaatctatgccttgattctatcacttagtattttagttattcctatcaaatacatgactgtgttaatttcttttgccacaaaaatgctgcaaagccacaaactcactccaaaatttagtggcttagaacaataaccatttattatagcccacaagctcaagggtcagctgatcccggcttagcttggctacatttgatataaaacagtagaaatttagaaattgaatatatgtagaatatctcttgtaccaaaaatgaagaggaataatagattttgatttttctttgttgtattctgtgctgggtgctaatctgtcctagctgtcagaacaagtagaagccatactggaaaatcatttatttgttactatcaaatttatttcagtgaatgccattcaaaccactctctctgaggagcccagttaccaagtcctccaccttgttagcaacatggacttaaatgcactaattctagaatgagatcttagcaaagtaccagcatttgagatttgtgcaaattgagctcttaaactgtgtgtatatgtgtgtgtgtgtgtgtgtgttcattctagcactcccactacataccatacaagtagctgtatagcaggtatatatacatgtgtatatgtacataggtaggtatatgtcaactgttgaaaaactagaaaatacacattaaataaagtaagggttgataaacattagtagttggaacattgggagatttggacttctactttgcagattcagttggctgcattagatttaaggaaagaactaactttggagaaatttgtgtttgcatttcaggagagatttcttaaagaggaaactaccagaggttagtagatattaacatctagtgatttaaatttgagaaatgcaaattagacatttaagctgtgggtttgcttcccgttttacttgctctaaaagtaatttttttaaaagccagtaacaaagacatgcaaaatagtactgccatgggggaaaaattacttgaaaataatattcaagattgaagaattaaaaaagcttgacatctagtaccaggaatgccagctggcttgttctgtcaaaaagcaagcatgtgctttggaataacactcttgagtagactctaggcgggttttgagcccttctgattatctaaatagatgtggaagtgacttatcttggtttttctgagtcaaatgagataatgagcaaaggccttagtaggtctttgatttttgcctctaaccctttttctatctgcatgttcacaaggtcaaggctgatgagatatggcaatattgagagagtcagaataggataaagatctcaaatactatatatatatttttttttcatttttttttccctttggtgactgtatgagacatgtcagtaaaactttaaagacaggccaggcgttgtggctcatgcgtataatcccagcactttgggaggccgaggcgggcagatcacttgaggtcaggagtggcaacatggcaaaaacccgtctctactaaaaaatacaaaaattagccaggcgtagtggtgcacgcctgtagtcccagctactcaggaggttaaagcacaagaatcgcttgaacccaggaggcagaggttgcggtgagccgagatcaccccgctgcactccagcctgggcgactgagcaagactctgtctcagaaaacgaaacaaaacaaaagacacacagaaaaactgtaaagacagaatgaaagagatgaactttttacatctcgctcatttcatcacatactatatagtatgtgtatggtttcatatatgttagtgtgtgtgtatgtatatatatgaagttaaaagaaaacattcaccttttaagactaaatggacattgactagattgtaaactgtttttgaggctaagagtttgtttgccatgcataaggctctattttttgtaattccacttttatattcatttatatcagtcctagcagtagatgccactcttactgggtcctgcctaaatgcatgcttcaaatgttggttattaatttcacgagtagtgaataacaaagactcctattgagggacctcttgatttcctactgggcaccagcagcaagcatgacttactggccttcttatgagtgggtaggagttttgggtcaacttgagaacatctatcctttgagtagtaaaaaagcttggtattaggttggcacaaaagtaattgcgatttttgcaccaatctaatatcaacagaggccgtgaaaaacatcaagggaggatagcttgtaattagaagccagatcaacagtgacccaaaaagaatttcaggtttccaggagtgaaatatgtagattactcctctgaaaggaattgtttttctcctattcgctttcatggcaaatcattttttaagccgaaactcaagctctgaaataattgtgtagcaaatagtggctgtgaatagatgtggcaactctccacaagggtaaatagaaaccacttgcagtttcagtcatcacattttatttttcttttttaatagcttctctatttttgctcaccacaaatacatgcacacacacacacaggggcaaagccttggaaaattgcaattttccattttaatttgagagacagcccggtcacattaacagaacccttgacggaataggttgaattcccttctctgtccctataaccccatggccttggacatatccttacctggtgccctttcctccctcttatggtccacttttgtgattctgattttaatttcagttctctgttagtgatgaaatgagcaactgcagatgttccgcttacactggaaatacttttttggcatttaaaagaaaaccctacagatgaattattcccctgaaaggggttcactcagattttctagattatgattctagaaaatagttctttacatttgacaatggagaatttaaatgttttaatatgaaaatgtaaagcactcttgtggggtatagttgaattatgcccaggttaagggaatccagtatttatgtcaggaaaccatggatgtgatagaaatagtatcgctacaaagctgggcacagtggctcatgcctgtaatcccaacattttgggaggccgaggcaggaggatcacttgaggccaggagttcgagaccagcctggccaacatggtgaaaccctgtctctactaaaaatacaaaaattatctgggcgtggtggcacaggcctgtagtcccagctacttgggaggctgaggcaggagaatagcttgaacctaggaggcggagaggttgcagtgagccgagatcatgccactgcactctagtctgggtggtggagtgtgacagtgtatccaaaaaaaaatactgagattatgcaagaatctgactcgaagaagtttgaactgattaaaaagtaccaaatacttcattatatgaggccagctatttagactagtcagcgggtggttcaaatgcagaaaacagatggctttcattagccagaaaccttaaaattacataaatccacggatgcaactaagctatggatctgtgccctctccttgccaaacaggacctctcagctagcaaaacagagagctccttgttcacttttccctcctagttgagaccctgttggggaggaatgctgccaagcctgctctataaggaattttgatctcctagatgataacagagagaaactttttggagaaagggaacaccctgtttgaaaggacaacaagagaacttgttcaagaaggtggctttgcatttaattgaaaattgtagcaactgtaggcgtagggtttccagattcacatctgcagactggtccagattaggtatatatgtttatattcgtttatgttatccccttaagcctcttttaaagccatttctaaaaattgctttggaaagtccatttcacttcagtattctttatattgtggctcaaaaatattttttttctggtaacaaaaatattttctttctgtttttaagacttgtagcatttttaagtttgatatgtacgtctctgtagttcagagcacttggtaaacagcctcttgcttttgaggcaatttatgaatgcttcattgtttttagctggttattttgttcattgtcaggaacactgttttcccatgggaaagcatctccagttttatgatgtcagtggcaagtcattcagtttacaagaattaccttcatattcagtcttagaaaagcatagaccacaaacggccagttatatcacagttctcatcttttaaatgttgtcttagatttttgcaaagtaatcttaactcaccttagaatagtgttaagacataaatagaactaaaatgtagtagttaagtggttatatttcccatctactaaggtatttatatttcttttcttttagaaaataaaaatgtttaaaaaattaggaataattatctttaggatgactttgtaagactgtgcttttttactggcagcaaatacctgccagatttcaggtatttggcaggtaaattgaatcttaaaagatttcaattttaagagtgtccatattaacagatcctgaataggaccctgtgtatcatttattaagtcatttcttggaggcttcactcaggaaaagggagttaacccttggatggcaatgtttaatgtggccacatttccttctggctgaatgccagggagtggctgcgcttagcaaccaggctttgtttcataaatgggttatttgatgcaggtgaggatgccgtgagttgtttgtcttgttttaattcagggagacaggcatatgtagtgaaagcatggaattgtttgcagatgggcttcagtaagaataggaaggtttctggttcaatttgtatctccaagctaattgctctgatttccatatacacatctggtgttggttcggggggaaaaaattttacttgagaaacatggcttttgtgagttgatatttatttgtgaagggcctcttgtaatgtcaaatgtaagaagatctatacacacaaccaattttacaatttctaattcaacagcttaccctattattgaggattcgcagtttaaattattaaatgatctccacttgaagaaaatagagcatgttaatcatcacgattctccaaacatttatttttaaagttaatattaaatctcatctggtggaaaacctgacaggaactgaagcatatattttctagtctaaactctcattgttaaaatgaagacaacatgagacagttatagcgccgtaatcaagttatttgaaaaaaatgttttaaaaattaccactttttggtagtcaacatacacacatatgccaacagatggcattaaaaaatggcaagaacatgagacaattatagggtcataataaatttatttgaaaaaaatgtttaaaaaattaccactttttgatagtcagcatacacacatatgccaacagatgacattaaaatagctgtaaagtcaagaagcagggaggatgacaaagtgaaaaatagaagaaatcaaaggaagttaagtcaaaagaggaaaaaaaaatgaagcatttacttggtttgtcaggtagggtgatccagtgtattttgccaaaaactttcctggttttagcaccaaatgtctcagaacatggcagctgatgacctccctcacagtgagtgatcccagagagcaatgaagaattgtgatgcccttcatgaccttgttttggatgttacacatcatcatgcccttcagtgacctttctggtagcaaagggtttgtttttaaaagagttgcagcatctttaagtctaatatatacatgctcggaagttacaccatcatcacttctgctgtactccatttgttgcacagacagaccctgatacattgtggagtttcccagggtccatgaatagcaggaggcagggactattgggggccttcttggaggctggctaccctggggagagaaattgtcaatttcctctccttgcggggaggaaatggaatcaagtgcatttgtattgacaagaaggtagaacgctttccttagacattgtaatgaacagattgtggataaacaaaagtacagagagagtttgaggcagaggaggagactgtttcaacagaatatttaccagctatggtaaaggctcattagtgtctccgtacagttaacaacatgctgccaagactggaaatctttgggacaggaatgaattcggaaggtgaacagaataaagtactgtgggaacaatggcgattccattagtggattgtacattccttacgggcagggccctccatagcatctgatgtagggccttatccacaggtatctgattattatttgactttctttaatgtttttgcagtgttattatctatactacttatttcagtaagattgacaacatttgcatttcgatttctaagatcaagacaatgaatttcctcttaatccctcaggaaagctgtgaaatttaaatttatagagcattctacttagcctgctgctttgcatctgtcagagaatgagaccccccagtttcatggaagtcacaggaagtggcaaggggctcagatggagttgaggggttctagctatttctgcagatgatctggatattttggcatcggctgctttgacttaaccatctggcaatgtaaaggcagaatttcgttaaatattggaaaagttacttgaaaacatggctctagagattttgccagcagcttttgcactcatgacttggttcaatctaagacctgttttgtttttttgttgtaaggacctaagtcctctgttgggttttgacgaagtatgtgtaaaaatgactaaaatggccagaggtatcttattttacatttatgtgggaagaaatgtttggaaactgtttcatttctttaactgaaaatttctcagtgcaattttagttggtgtttttcctcctgtggacagtttttaggaatgatacaagttatcgtggaatcacccagttcttgagtgtgtgaacgaatggcttctgctggaagttaattcttcttggcatgggtgtctcacatttccccagcagctggatttgacaagggagggcctatcatgattaatatgccttctaattgattggtttaataacacctttactcctgtggatatatttttcatttcttgctgaatttttttttctttttgagataccagaacctgttaagtgacacggtatagatatttcaggacttccattttctcttttaaaaatatttttgtaaaggtaatgcctgtacacagaagagtttgaaaatacagaaggcaccctttttcatgaagttattttgtgaagtggtctattgcctgcaatggtaatagctaggaccccttacttactacccagcaggcactatgtagagctccaaatgagaaaatgttggctccttgcagatggttgggagaggagacaccagcactcttaacagacttgttaagagttgagactgataaccagagaatattctgggggaaaccaggagggatcgccaacatactcagttatatttgtggatggtgaattctacagtgaatttttctgttcaaaatcataatacagtcacttgctaactaccaacgccatacttgctctcagtgctgagaggtggcacaaatattattttcagtcttggtcatcaggcagggcctggcaggcatcatgctctgtgtgagtcagtggagtttattataagaatgcggtagcctccacagtgattatatttattataggaaaacgtgtaattttgttgtcagaacctttcagcaggtaccacaaaatctcatatgggaaaacgtgtaaatttttcatgaataaattcctttcggtattggtaatttccttctctgttttagtataaaagaaagcattgccttataggtggctaagaacatctgtagcatacataacacttaatctaaaggagtgttgaagaccgggctgattcctaattgagaatgagcaagaatagaactctttttgatagttatccctgttcttcctccaagcctctgccttggagctatggatactataactaactgaagcttcttctttcaggtacccactgatggtaatgctggcctgctggctgaaccccagattgccatgttctgtggcagactgaacatgcacatgaatgtccagaatgggaagtgggattcagatccatcagggaccaaaacctgcattgataccaaggaaggcatcctgcagtattgccaagaagtaagtcctgtccggtggctagcaattcacgttggatcacatgcatttgttttcaaaaaatttaacttcttgtattttgcatcagtattttaaccctacagtaaaaatcttggttcctaatgattcaccataccattaatatatttatttgcattaccctatgatatacatataaatgtttttaaaattatgatgtcgtattatgaccatcactaaacagtagtttaagatgtcacagcacttttttttttcctcactctgtcacccaggttggagtgcagtggcaagattatggcttactgtagccttgacctactgggctcaagcaatcctcccacctcagcctcccaagtagctggactataggcacatgccaccaggcctgactgattttttttaatttttagtagagatggggtctccttgtgttggccaggctgtctgaaactcctgggctcaagcgatcctctggctggacctcccaaagtgctgagattacgggtatgagccaccatgctcagccctccacactcctttcatcttcagtatatatctcaccacggctctacagtcaaggtcttttggttaaaagtgctagcattaatttttttctgttaccagcttgatacatattttagttcatttgtatctgtttgtattctattatagtttggttttttcctcccttattaattttactttttgactatcatgttagttctatgaaatatactcagaaagctcacttttcactcattctctattgataaacattttcattgttcctgatttatttttttggcaaaagaaaatacatatttttccttcttgtacaaaaaaagtacaaagttcactgttctgcactttgcttttttttttttttttttttttaacttaactttgtatcctggaaatcatcctttgtcatttcgtggagatcttcatttttgtttaattctttgtagtctttttgctgttactatacagggtgctcctttcttattcaatttaaaatagctggagttccaggcattttatctcacacttcttagatagttatctctgcatgtgactgcatcttaagaacattagaagtaattagtcttatgcttgttggcaaagcagaattctcgacactcattataaacagcagatagcctggcaacattttcttttgttgtaatcctttttgtactagaaatttttctttagcctacttggataatgaatgtttgttgtttaattaatattactattctattgagatccttttattttaaattgtaaatactaaaattattattattaaaaggtttaatttgttttgatagcgctctgtttaagaaaggacaagctctaattactaattggtgttttgagaagcaaaaagcatctacattatcacaatatattacatattaagtaatttttatcttgaaaggagtatgaaccatgatgtgaaatgatgaatagtggaaatcactaatacttaagttcattatatgtattttttgttttgttttgtttttttttgagatgacatcttgctctgtcgcccaggatggagtgcagtggtgcaatctcagcttactgcaacctccacctcccgggtataaatgattctcctgcctcagcctcctgagtagatgggactataggcacccgccaccacgcccagctaaatttttttgtatttttagtagagacagggtttcaccatattggccaggctggtcttgaactactgacattgtgatccacccatgtcagcctcccaaagtgctgggattatagccgtgagctaccacgtatggtccattatatgtatttttacaagaacattctgtgtgctgatttactaagtatggattgataataaatcagcttttgcctgggtgtgacttttataaagtgtcaatgttagaaataatatttacattctgctgaagagttcttgtagtacaattgtgtagataagttataaattttataaatcagaactctgtgcatacttatatgtttttgataccatttttttgatatatgcatacagactatgtattctgagtgtcaaataaactttttttaaaggctagaattaaaatttagtttatgacattgaccaaattgtccttttctggtgaatcgactattttgatacatgtgtcatagtttgcatctaagtttttcttcccttagtttcacgtatgaataaccagatgttttcacatttgtatggtggccataccaaaaattactcttcttgaccccaggaacacccctcttttcccgtttcacttagagatcctactaatgcctgggtagctttactttctgtcttagcctgttgtttgtcccagggtgtattagtctgttctcacattgctgtaataaactacctgagactgggtaatttataaagaaaagaggtttaagtggttcacggttccaaaggctgtatgggaagcatggctggggaggcctcaggaaacttagaatcatggcaggaggtgaaggggaagaagacacatgttcacatggccagagcaagaaagagaaagagtgtgaagggagaggtgctacacactttcaaacacccggatctcatgagaacactgtcacgggacagcactcgagggatggtgcttaaacattgaaaccacccccatgatccaatcccttcccaccagaccccacttccaacactgggaattacaattcgacatgagatttgggtagggacacagagccaaactgtatcaaagggttgagcacagagtggttcttcccagttctggactttaccagattgttggtggccaccatgagtggggagaattagccctttgctgtcaccttcctcttgcaattctggtattatctgtcctctgcctaccacccacccacggaagtcttgttggatgatacacaccagccagattcttcaacattaggcgccataagtaagaaagggccaaaacatcataccttgtgagccattttaatggatttgggctttattttgtagcaacaggaagtcactagactttattttttatctatttatttttttctttttttttcttttgtttttgagacagagtcttgctcttgtggcccaggctgcagtgcagtggcacaatctcagctcactgcaacctctgcctcctgggttcaaatgattctcctgcctcagcctcccgagtagctgggattataggcgcctgccaccacgccgggattttttttatttttagtagagacagggtttcaccatgttggccaggctggtctcgaactcctgaccttgcgatccaccctcttcggcctcccagagtgctgggattacaggcgtgagccacccgcacccggcctagactttattttttcagagaagaggagtgattgtagatttgcatttaaacaaatcaccttcttgctttatcactatgtcccctaccatatatcttcgttctcccagagactgccatgctgcagcctctagccgtgtgctgtccagtactgtagccactggccctatgtggttgtttggcacttgaaatgtggctagtggaaactgatgtgtgctataagtgtaagatagataccgtatctcaaagatataatgtgagaaaacctgtaaaatgatcacattcatttttatataggtttaacattgaaatagttatgttttgaatatgttgttaaatacatcataaatgttactgagttgtaactatgtgattaaaattgatttcacttgtttcttttgacgtttcacgtggcagtgaggaaattgaggttccataggcagttgcattctgtttccgtggaacagtgctgttctctgtgctatcccgagccaccagtgactctgagctgtaagggtcttagatcccatgatctggcaagtgggagagggaggtagaaatgagtccctccataccttcaaccagaacttcactgcatgttgcaagtcagggaacaaggcttgtttggggtccttttaaatacatctttcattaaatacatttggatgtaagatgattatatgcctttctagaaccctgtggtgctctcttcctcctcagacataatgtctttggatactaagggtgcattgatgaacagaacacagggcctgttcttcaaagggggagaaaagcttgtaaaatcataattttagcaatctaaaaactacatggtgacagtgacactaataccatcagcattgagcattcacaaagggtcacaaagggtcagctactatgctaagtacttgcactcattttacccactcagtgacacctgtggagaagaaccgaaggaaagcaccttggggaattgcagcattgaaggcaaacaaagagagacgattccccatgagggagatgagcagtggccagagagataggataggaagtaggaggcgttacatgctggaaggcaagccatgtaaatttctaaatgaggggaaagataagagtgcaagcatgatgcaaacggaaagcagttgaagtgtagtttttgacatggtaaaatcatgtctgtcatgcagactgaacacatgtcaaatattttattcaattcattaatgagatgaactgtaagatgtgaaaaatggttcattttgacttggagagatttaaaattccttccccagcacacttgagttgcatggctatgaacaggaatcatctggaattatctggaatatcgtcaaattatttccatggtacaggaacacttgcattgctatggggtgtctgcagtatccatctttacaaagctctaagggtgtggaatagcttgtaaggatgtaagtaataagggtgtaagaattttaagggtgtaagtcgtaaaatagcttatttagtagcaagtcaactggaggaacatgctgtagaatcagataatcctttccccgccaccctcagggtctgcaagacaacacctgcatttcaatgctaggacacccagcaatctcttttgctcatatcttgtttttggacatttgtatgtgtgtgtgacaaaacattgttaggatctggcaaatagaaggtcattgttgaccctgtggaatagcatggggagaagttacgttgtagtccattgcaggaaaaacaacgtgggtcaatggtgagtcagctgtggactcctggaggaaagacctagaggcaaaaagctttgaggtcattgaagacaaaaggaaaggctttgtgattttgatttttaaatggaaggaatttgggcctaaggaagcttaaactaaactgtgggaaggactgatacccatcctaagcactagttgcaggtatctcttaagaactaggttttggccgagctccgtggctcagacctgtagtcgcagcgctttgagtgagaggatcgcttgggcccaagagtacaaggttacagtaagctatgactatggtattcagttctgtaagaactaggcagaaaggagatccagtggatatgtgattgcctgggtcttggaaaggggagggaacatctccttttctgaggaagaatggggagatagggtgggttaattaggcagtttcttttgccaggtgataaaaaccccctaaacaatttgtattttatatatggagaatattttctcccactgatgggaaggatcgtagtgtgggggatgcttacccaatttcttaaaaatgtacacagaaatgagatccctaggtgctggaaccgagggtcagtactgcctagaatttccccattagggtctcttttgtttctgcttaccttcctgctgtgtgtttactccttttctcctgctaagatgggtgtcctcaaggagaccagggatgttggtagccacgacctctggtagtgttagtcctggtttggcatcccaactttgttctgcccatgggcattatcagggagtgcttctggttggcactgctttgagttacacgtctgcccttggagccaccaccgtatctgcagggactcagtatcaggactagcccatcttggccttgtgggtgtggccgtgtgatgtggggagaggagctgttgccagaagagggatgaggaatggcatgggcaaaatagaagaatgaccccagtgctgcaacacagtgggtatggattagaaaaggcttgtaggctggacagggcgaggtgagggagtgcatcatgcattaggattttaagtggctttttggggagtattgagcaggtggcaggggagacaagttcactcagaagttttagacagtgttgacattttctttcaaattgtgcatcttgaattctctagaacattctttatagatatttcaggatcttcctgccactttccacattgtagctattctggtgtttttcttttataattagaaataatgaatagttctcatttgtaggcttggattttcatgcgtgtgttggaaagtgttcgttttgccttttttttttaacttcatgtttttattttttaaaccgtattgatggattcattgctaggaacggcaaggaaaagaatactctcacaatgttaccacgtttccttctcacaggttttataagttgtattatttttatattttcaaagttataatcttaccatctcctctgttgccatacttctcattcatagggtctgtctttaactggactcattgtttacagctagtcttttcatcagatcatctcaaaccctgtattacattaatattttgattccgttttgttggatgactttcatcttaatcattcttattgttgaacaatgtttttcttattattgaacaattgcttcattaggtatagaattcctggttgatgggtgtttgattcagcaccatgaaaattcacggtattctggtatctgtcattgggcaaattcttcttctttttttttttttttttttttgaaaaaaatgcgtggaaaccattagttaccattgacagagctactcatttaatgattttttttttctcccaatagtggtggatgaattttttactttgcgttctcactttgtgtctctcatgaccaaaatattttagagataactagctggctaagtctgaggtggctgttaacagtctggtcctaggatagaacaaaaccaacagaactcatcaccgtcacgtcgttttgactttttgctcacaagtttaactcattgtttaatttgtttttccaaaggattgctttgcagtatacatgttggtgcatagcttaacatgatgataaatacataactttgactgtgaattatctactctgctcctttcatagtctcatgcttctctgaatttgtattttgtgttactgggttgttttgttgttatcattcatagtgttttttttgcccttgattctttgatccaggttttggtcaagggcaaggttcaagagaaaaagtaaaaacacagtcttttatttttgctcttggttataaacccttgtaaagtttgattgagaagataacttggatcttatggtttaaattgagtctttgtttaatcccaagtcttccaaattctttgtgcttatgtattctttcctctttcccaatcgtaatagttttgcttctgcctagtcattggtcaaatacctgcctttcaatgcatttaaaaaatattttgtgttagcaccatttgagatttttccccccttttttttcaagtatgtattgaggactgttatgggatgaatgtttgtgttcccccaaaatttagatattgaaaccctaaccccaggctattcggagatggtattcggagatgatacctttgggaggtgataactgttagatgaggtcatgagtatgtgcccccgtgatggaactagtgcccttataagaaaagataccaaagagcttgcctttttctccctgctcaaacgaagaagtcacataaggacacagcaaggaggtggctgtctgcaagcaaggaagagcggcctcaccagaactcggtcatgctggcaccttggttttggacttccagcttccagagctgtgacaaaagacatttttgttgtttaagccattcacagtaaggcagcattttgagctaagacaaagacctactgtggcttctgtaggcaaaagccctacagacccaaagtgttgtgagaattaacatttctagggatcatgccttacagtggattttatccaacacttagctctgacctagagcacgctagtcgtcgttaggtaaatgcttgtggatggtagtttctggcacagagattggagcggtaatgggcaggagttctgtatccagcttatgctgagagagcttcccataaaatggagcctatactttccttttgcagagaccatttctatccattgatagaattcttttttttctttttcttttttttgacgggatctcactccatcgcccaggctggagtgcagtggcatgatgtcaacccactgcaacctctgcctcctgggttcaagtgattctcatgcctcagcctcctgagtagctgggattacaaggtgcacgccaccacatgtggctaatttttgtattttggtagagatggggtttcaccatgttggctaggctggtcttgaactctagtgatttacctgcctcggcctcccaaagtgctgggattacaggcatgagccactgcacccagccttccatcgacagaattctaaagacatgtttaggcaagagttggtggaatgttggcgtgtagtccagatttgccttcagtttgtttttatccgcttcaaatgcaaaggccatgataattcaatagtaaagtcataaatccatagtatgacttaaaatatttggttgtaatattacaaagtatgcttccaaacacattaagcatgcaaaatccttatattgttctttttgtttagtgtttagggtagtttgtgtgaatcatagatgaccacagtagactgttgagttgttattttcttttgacattctttgatagaaaacagtgcttttcctctgttatttatactagaagcaaaaagtatctctcatagcattatggaaacaactcgaatacaactacgtcaattattcatcttttttttttttttttttttttttttgagacagagtcccactccatcaaccaggctggagtgcagtggtgcagtcttggctcactgcattctttgcatcctgggctcaagtgattctcgtgcctcagcctcccaagtagctgagattacaggtgcccacaccattctcagataatttttgtatttttactagagatggggtttcaccatgttggccaggctggtctcgaactcctgacctcaagtgatccacctgtcttggcctcccaaagtgctgggattacaggtgcgaaccactgtgcctggcagttattcatcatttaacagcataaagtggccacttgctttaataaactattatagtaccaaaattttggcctgaggaatttataaatataaatagaacaaaacaaaaataatattccccttgaaacatattctaaaaccaggggctaaaagttagaattgttagattttattgtcctgtttctttgggatgaaatgaaattttttaaaaaccatagttttggccgggcgcagtggctcacgcctgtaatcccagcactttgggaggccgaggcgggcagatcacgaggtcaggagatcgagaccatcccggctaacacggtgaaaccctgtctctactaaaaatacaaaaatatttgccgggcgtggtggtgggcacctgtagtcccagctacttgggaggctgaggcaggagaatggcgtgaacccgggaggtggagcttgcggtgagccgagatcgcgccgctgcactccagcctgggcgacaagagcgagactccggctccaaaaaaaaaaaaaaaaaaaaaaccacatagttttacttaaaccaaaggctttgggattccagaagaataaaggaagtgtacttcaattctacatctcaagaatctatttcttcccaaatttaatacaggcaaatttagtctatatttattgggcactgttaggtttttgtgtcaggtgttgctgagtggcgggataccattcttggcccataaggaccttataaatctattaatacaattaaattgtgaagaaaatttagaaaattgcaaaggtagaatgaggttgcaaattggagggtcttattctggagataggtggaagctatggcagatttttagcatgaatgctttctggtcaagacacttttagaaaaattagcttgtttccaagagtagattagattggggagagaaggaattcaaattacaaaataatagtgtgaaaagcattgtgggagatcatcctgtccatcccctcattcatgatatcctgaggtgctgtattaagggcatcattgctctttgtcacccgagcagtccaggaaggctgcctgttcagtcttagactgtatcctcacagtcttaaaccatatcctcactttatgatagaaacacacaggcaagtgttgtaagagttacatattgtcagttaaacaagaaattggatgagtccccatactattcttcctcttttaaagagagaacttgggccgggtgccatggctcacacctgtaatcccagcacattgggaggccgagtcgggctggtgacgagatcaagagatcaagaccatcctagccaacatggtgaaaccccgtctctactaaaaatacaaaaattagatgggcatggtggcgcacgcctgtagtcccagctactcgggagactgaggcaggagaattgcttgaactcggaggccgaggttgcagtgggccgagatcacgccactgcactccagcctggcgacagagtgagactccatcccaaaaaaaaaaaaaaaaaaaaaaaggaaaaaaaaagagataacttgaaacaggctcttccagcctctctattcttttaataacatgcagtgcacttcttggagctaggggctagggtctaggggcttcttgaaggtgttgatgtctctggtaacttacactgcagggcaggtctctggagggaactttgaacaggttaagcctcaaatgcaggcagagatttccaattgggaaagttaggtgaacgtggctttatcatctcttttattggtttatgggtattttctctttttcctgttttctttcccaccatttaacattatctgttctctgcctttttaaccttctggctttaaatgaacagttgcttaatctatagattaacaggatcagcaaacaaagcacagcagtgcctgcacaaagcagaaactgcctgttagatgagttgagcaaaaccatttcctttgcccaactttctcctctaaaatacataactgaacatgggattcccagacacgaattgtttctcaacctttctttttccattctacagttgtatgaaattaaaattaaataaaaagcaaacaacagaggtagtctttttaatcttaccgagttggaaggtatactatatacattatcctatggtagaaggtctggtacattcttgaccattattactttgctatgggcacccttcacccttgtaggctgaaaattggcaaatcataggcacgtatacattgtggttttggaatttgaaagatctcaaattcatattgagtgagacagtttttgaatggagggatcaggctgtctatatgtggatatattttatgcatttctggtctgtataaatgtaaggattgctttactgaccgtagatttcttctagggttaaaaagttgaagccagtttggatattttaaaataagaaaattagccctacattgaaagagagaataggaaaatctaggctatgtgtacacatctgcttgtgttttcacaattgtgtcctgtcctatttatttttatttctctcccatctcttccctcccacccacaatttgtttttcattcaacactttgaaattagaatagcttatctatcaaacaaggttctttgacaggattttccaactctgagtatgaaagtgtggatataacaatatatttatatagaatgtcagaagcagagtttggccagattattgggaaatattctaacgccctgcagcattttaccgcctttgcttttacataaggccatcatttggaaacatagcatgctgatacctcccattattgcagtagcgtttcatcagctgcacgctgcctctcagcgcctcattaagttgcaagcagagaacgttttcgttttccagttctctttctcaattaagttagagattgtattttcagtattcctcattattaaaagaatttttgttgagaatagtttaagatgtgatatttctttgtattccaggaaaatttaaagaatgtcattgaaatccagaaacagaagtatatattgtctaggacatgctttgtcttggtttatatgcctaagtccgagtagtttaaaatttatgattaatatactctttgaatgcttagaaatggcatcgattttagttgttctagtttcatcttaaataaattggagtaattactaactcaggattatgatgtgctacacataaaacatttgcagtgatgtctggtacttaggaaaccctcagttatgacatttttcttactttcttcttggatatgttctttgaaaaagggactggtatggaaaagctttgagacgatgaaaatatacaagataggctatctctgaaacaatttggtatagagcatttgattctctgtttcatgtatatattcatatatgctagctgcagtcatgcagacacaatttggatctgggtttttttttttttcctttttcacatgcagttataaatttagaaacctggctgtttcctctggactaaatgtatttatttaaattttcagtgctttaaatgcaaaattacaagcatatgtacaagtagaaagaatagtaaaatgaaccctcccatctatctgtcactgaattgcagtaatgatcaaatctagtcagtcttgttcctgagtcagtctggaatgcaggttttttcccttaactattcaggttctccagcaatcctggcaaaacacatgcgggtttcagctcatctctttcagtgacctgtaaattaagatgtgctaaagcatcacatgttactcattgacgttttgttaatatatttaaaacattttattagtaccacataatttttagcgttttcaaaaagaaataagaatttggctaaaggtgaattttaaaaattgaatgactaagtagaaaagtaggcaaactgttttcagaattagtagcaatttccaattccatttactctgttcattaactttgttttcagccttttgttagccatgtttgattttgtgtttttgaaatacctttggtcattttaggacttttggcattaatcacctgtcttaggtggcctgtttacaaaagggacttttcggttctccatttgcccttaatgttgggaatagagacaaagtttctgtaggactctgacaacatatggctttacaaagtttttttttaatatatacatttctcttcttggctttcttaaatatcatcaatgtcttttcttgctttacgtatttagcaacttaaatgtcatcttgtctgagatcaatatatttccaacttggagagatagtgagaagagagacttcagatttttaaaatgtggaacaaaacattctgatggtgaccaggttttaaggtatttcttcagtagacaaaactacttaggctaccgatgataagcttttaatattaataataattattatatataaaaatattaatataatatgatctaagattgtttctattccccctctttcctggttgttaggatttggaatttcttatgcactctttttttttttttttttttttttctgagacagagtctggctctgcctcgcaggctggagtgcagtggcgcgatctcggctcactgcaagctccgcctcccaggttcacgccattctcctgcctcagcctcccaagtagctgagactacaggcgcctgccaccatgcccggctaatttttgtattttttagtagagacggggtttcaccatgttagccaggatggtctcgatctactgaccttgtgatccacccgtcttggcctcccaaagtgctgggattacaggcctgagccaccgcgcccggcctatgcactcttaaaattatttcatgtactgatacattcactttcaatgataaaacatggctgtatgaccaggtaggtaggctgcttttcagactcctgtactaactgaatgggccccattagcccaagtgagagcttaacttgtcactcttcctaaatgccttcctcagctgagtgcttatttacagtaatctactgcttatagcagatgctatgatttgtataagctgtccatatctacttggaagaacaatattgaaaggcattgagatacttactttccctcaaaagcccataatccaacaactatttagaatatcttatttaagagataggtttataatacccaaagggaacttaatgtatactgaaagtccctgattgaatggattctgaccttaaccagaaatattaattacatgcttatcagacacttactgtgctatcccagggtttgccactgttgagggaacaccagatgaatcatattgtccctgccttcaaggattatatattctaataggacagacagcccatcagcagaataggaggtagcaagtggtcagggatcagataaagtgatcaaggcaagtggaggatgcagtggtaggacagaatggtctgcgcacagagattgagggcatcatgtggtgggaattagtgaactagcatgcaagccgggcctttttcttggcttttgttcaattggaaggagcataaagctactaaaggagcttatgtttagaaatagggcttattgaaggggacaaggcatctcctagaatccaaatgcacatcccaagacttaaaagagttagagggcacaggcaggccctgtcagatccggtctctgccagatccagtcttgtctgtttctcatcttcccttgtctctctgagtattccctgttttcctttcctggactaactgcttcttccagatgcctagtttgagtccacccatggttttttgggggcttttctttgtttttttgttacgttctgtttttgttttttgtttttttgaggcggggtctcactctgttgcccagactggagtgcagtgacgtgatcccagttcactgcagcctcgacctcctcgcttaagctgtcctcccacctcagcctcccgagtagctgggactataggcgcaagccaccatgcacccatgggtgttgacatgccacctgtggctcagacttatgctcacctccagtcaagtttcttccttatctaacgacagcctttgtgtgttcgtgaaagcccttgagggaaagaatgctacgtacagtttggttttcttgggctctaataagctataggggatggtgctgcagagtttgaaatacagtcactaatgagtcctccttcagagagctgagggtgggagcaccacataaaaggagttgggggtcagcagcctcctgatagtctgaaagccaaagatgatggatgtggggctccacggggaggctataacatgccacgttatgttttctgcccttgaggaaagcttcttttcaccaggcaggcagtacagatacaaacttaatagcgatgtgaggcacactgataaataccagaaaacattctgtaagaggggttagcattatttcactgtgtgcagaggaggtttgtccatgtggggggaccctaatgggcgtaggcatttgaagtgtagtctaagggatcttaggtaagagtgtgtttggaacacagtgtacgtatttatacagcaaatgctctgtgtggctataatttaggaaaatttgtaggacttgaggacagcttatttttctactagctgacagaggcttgggtttgcttctgctttaagtataagtatctcgagtccttttttaaaaaggaaaatcaaggaaatagttggaattgggtttcacataaaaaacattttagaaaagaaggggagtatgagagttaggatttgctaatgtttgctgtattagcaaattatttgcaatgcttgtcatattagcaatacatgtatgttttggaaaacacatgcaaattaagcagcttaaggaacttttatctttatttcctatgtaagatttgagatgctgcaaagaaaatattaaaacattgaaccgatacttacagtagtcctcctatatctgcagaggataacttccaagacccccagtgaatgcccgaaaccttagatagtaccaaacccaatatatactatgtttttttcctataggtacatacctgtgataaagttgaatttacaaattaggcacagtaagtaattcacaacaactaataatagaatagagcaattatgacactacgccaccatcactactcttgcactttggggccgttattaagtcaaataagagttacttgaacacaagcgctgtgatgaagtgatcaatggcaggtagcatgtacagcatggagacgctggacaaagggatgattcactttctggactgtgtgggtttgagatttcatcacactgctcagaatggtgcgcaatttaaaacttattgttggctgggcatggtggctcatgcctgtaatcctggtactttgggaggccaggacaggaggatctcttgaggccaggagtttgagaccagcctgggcaacataggatgaccctatctctttcttaaaattaaatataggccgggcacggtggctcacgcctgtaatcccaacactttgggaggccaaggcgggtggatcacaaggtcaggagattgagagcatcctggccaacatggtgaaaccctgtctttactgaaaatacaaaaattagccgggtgtggtagtgggtgcctgtagtcccagctactcaggaggctgaggcaggagaatcgcttgaacctgggagatggaggttacagtgagctgagattgcaccactgcactgcaacctgggcgacagagtgagagtccatctcaaaaaaaaaataaattaattaaataaatagaaaaataaaactcatttatttatagagctttctatttaatatttttggactgaaactatggaaagcaaaaccacagataagggaggactactatagttatgataaaaatcaggaacttaatctagccacgagaacatttgtatttctgatgaaatttttattcttgtctaaaatgttgaactatatttatatttatatctttaaatataaatgaactatatttatatctttataaatgagctatatatttatattttatataaatataaatatttttatatctatgtaaacataaaaaggctttttttcctctctggatgtttactggggttatttaataaaaacctagggatgatattgggaatttttgttggaattttaaattttaacgtgtttgtttctttttttgttttgtttcgttgtttgctttctgagctgggagttggctgtgcatgtggcagttgctttatcaaaagggtcttgctctgcttcagaagaagttttgttaccttgattgctaatgttctcccccttaaataaacctcctgatgttggaacagcaaaattgcattatgtttggaaaatctaaattaataatcccttatctctgaataaaagtaactgaatcaggttgaatttactgcttccattttaataggacagtaggaaaaaactatgcatgggctttatgtggttcaaatttttttttttttttttttgagaccgagtctcgctctgtcaccaggctggagtgcagtggtgtgatctcagctcactgcaacatccgcttcctgggttcctgcgattctcctgcctcagcctccggagtagctgggacttaacaggcgtgtgccatgacgcccagctaatttttgtatttttagtagagacagggtttcaccatgttggccaggatggtcttgatctcttgacctcgtgagccgcccgcctcggcctcccaaagtgctgggattacaggtgtgtgccactgtctccggcctggttcaaattttgtaatctccacatccatctgcatattaacaattgtcattgttggtgttatagagagagaagctgaagcacagaaaataacacgcatgttctagatttcctggtgggaactggaagtaaattctgtgtttggctgatcactgtataaagttctagtactagtctttagggaaaagccccgtcttcatggattttaatttgtcaatttgcaattctacctacttggaaatagtcaacctaatcagttactgccctgttgcaccaactattaccataggaatctgaagatggtatgcaaccaacatgaaaaagagatccttttctcctggtaatcagtttgtaccctacaaacaattcgttggttttaagttgtatagagggaaccatgatgtgaatatgcctgccactgggtttatagaaaaccgatgactcctgaggaaattctcagcagggttgtctttcagtgaaaagaaccctttagaaagatgcagtaactcacactttactgcacataaagtcatgtccctcagggtggactctcaggtgtcatacagtttatgactcatgagtgctgcagctttgtgatctaataaacaagtaaagacggtgggagaattatattcctgtacaaaaagccacttcacctttcattatataggaaaaaagccatgggaatattaaatttttagtggcatttttagagcattttctgtgatctaaagtgcctgcattgagatattaagatacttaagaacaaagtaaaataaagagaagtattaatagcaggatccctttggagctaggttactgtggcagtggtttcaagaataactctctcagcacccaccccaggattctgatttagagatttctttgtgtgttctcttagcatatacctctaccactgagtttatcccctgctgctacactgattgataccttatttttaaatttttgtttttaaaatagacggttttttagagcagttttagattcacagaaaagttgagaggaaggtacagaggtttcccatatacttgctacctgcacacatgcttagcctctcctattataaacatcccccacagaatggtacatttgttacaatcgatgaaccaacattgatacatcattagcacccaaagtccatagtttccctgagggttcactcttggcggtatacattttttgggtttggacaaatgtataatgacatatgtccatcattgtagtaccatacagagtagtttcactgccctaaaaatcttctgtgctctatctgttcatcctccccctgcccccaaccacccaaacccgtggcaaccactgatctttttagtctccatagttctgccttttccagaatgtcatatagtgggaagaatgtcatatagtatggagcctattcagatgggcttctttcacttagcaatattagttaagttcctccatgtcttttcatgggttcatagcccatttccttttagtgttgaatgacattccattttctaggtgtgtaccccacagtgttatttattcattcacagtaccttattttttaactgatttttttggggtctgggactaaggtgaggtaaacaaggcagtcaggaattgagattaagaatttttaatgtaatatttttaaaaatcaaaattactgcaaaaaaactccatgatgaacaaaatatcaactttttagacagagattgagtcacgctcaattgacatcaagccatgcatagttctcctactgccttattaaaatggaagcagtaaattcagcctgattcagttacttttattcaaagataagggattattaatttagatttgtcaagccctctgaatgtcatggacaattgtgagtgaaattccgtgtatcgtctaactccccatggatgttatcttgctcagaaaccttgttctccctccaaggaaggcactacttctcctgtagccttctcaggtcgaagttcttttctcaaaatcctcacagcgttgcccctagaggtgggaatgtcctcttttcctcttcatttcctcttttcctcttcatttttgtttccaaaccactcttcctttctcttccctaaaagcccccctacctcagcttgaagtgcatgctttcagacaaatcactttgctcctccacctgttggtcatctccagacctctttctacctcatcgatgttcaccattcagactttgaagattttagctcctgccttgctgtcatcaggtgtagctgctcatttgctgattcttaagtgatcctaatattgatctcaatgatccttccagtattccaatttgtcagttcatgattctcatccctccagtgaccttgttttcatcattctccatcacccattgcttacaatggtcatattatactccttgcaatgaccaatcactgcaactcctccaaaattttaatttcaattatttgactctccaagtactacttattaccacctcactttctccagtcctgtgcgccatacattctttagcccctggagtgtgatcagtggactcagattccactggtccctaccaccttttacctgtgtctaattcccctcatgttctcacttttgccacttgagattgcatggcccagcattctaatcattcccttgcttataccgtcacttctctattcgttgttatttatctggcaaaacaaccaccctgttgcaatgcaaggtttatgcaagggaatgcacattttcgaaatagatttttatgtttatgtttttctttcaaatctctactcattaataaatagaagtggtttgatatttcacaaatgtgatttaattgatcaagtttcacatttcattctaagtgctcagttaaacaccatgatgtattcacaacagtaatcaaagcaaggggctgtagttagttataggagcaaagagaattcatgagtttatttttatctaaatgacacccttgataacttttcgataagttattttcatgtaaattacttggaataagagcaggatttttatatagaaagctttctatgtgtcatatcctgtaaaatgtttgtccgattagtgagagatagggggaggttgaattttactaaacataatatccccagccatatctactgtaacgtttgtttaggacattacagactattatcctacaccaatttatttcacatcaaaaatcaccccatgcttgtaagaatcctcctttccccctcttgtttctattttagctcccctggaaaaataatattttaagtctaaatgagtacaataaattaaaaagttgcattgcttaatattttgaatggaatagctagatgcttgttcatttgctatctttttctttgtactgaatttctttagcttggtcagaggtagagcaggcttgactcttagtggatagtggtataggttgagtatcccaaatttaaaaatccagagtccgaaatgctcaaaaacccaaaactatttgcatgtcaacatgatgctcaaaggaaatgctcattggagtattttggattttggactttccggattccagatgctcaaccagtaagtatataatgcagatgttctaaaatcggaaaaagtcagagaccttgaaagcacttctggtcccaagcattttggataagggacactccacctgtaccttacagtggaggcttgttagatgcttgtaaatgccagcccctgcctcaagtaacaattgattctttttgtgtgctctcccaggtctaccctgaactgcagatcaccaatgtggtagaagccaaccaaccagtgaccatccagaactggtgcaagcggggccgcaagcagtgcaagacccatccccactttgtgattccctaccgctgcttaggtgagccggccggccgtggggctggtgttgattgggggcctggtcttgagggaagaaaaagaggatgctcctgttaggtcacatacacagacttgttcttcagcacattgccactctgtgttgtactgtgttttggactcttgcagttacattctgtgcactgaccctataggagcagtatttttgagttccctgcctcagaatgaatttacccagggtgtatattgaaattacaaattcctgggccagttccaggactcctgaatgaaaaatgcctatagtagcggatccgggaattcttattttaccgtatcgcatagatgattctcatgaacaggggccttgtgtgtttcttcacatagactttctagaagaaagaatctaatgtgaagctgcagcattttgttaatttctaaaaaaaaaaaaaaaaaaaaaaaaaaggctgttctacaataactactcctcttatttggtgatagtagaggaattggaattgggaaggctttttttctgcttacatcaaactggaggaaacagtctgattactaatgtttaatgtttgttttgtcacaaacctcaaatttacctcaacattttatttaaaaaaattgagtagttttatgtggtatcgtgctcttttcctctggaaactgtcatactccatatttaatctaacttggttattagtctgttcctagttgttgtttttatgtgaccagtcattgcagaagtcaagttctttgctctggtatcttacatctagatgttttccacaagtgtattcatcagtaggcaggttgtaaataaggatatagagattgtctgtggagattgtggacaaatattgatgtatattctgatgacttcttataaaggttaaaaggaatatttcaaagaaaatccaacagcaaacttacaaagtaaggatatttactgaagattccggagatctatgtaatatatggtcaaaaatgaatgtcctaagagcatactgattgctgttcattcatgtgcataatttgagacataaaatgaaaacactgggcattagaaagaagatttcacctggtgaatttacttacaatgtaattgatgaagagagtgtagaaaactagatttcttaaacatctgataattcaagagtttcctttttcctccttattccttgttcctatatgctttataaggcctcaactcttttctggttcatcaaaaagtgcagtttaattagatgaaaataagcagcacttaaattctagatacagaactcctactcaaaaaaatatagaagtcatctgtccccaggaactgtgtattttatactcacttagttattacaccaagaaataacacacagagattgaacaattcagtacaagttaggaagtagatcatgagtctgttaatttgatgggccaggctttgttaatgatttgtttcttttggttcttacttacctgttctatgaagtattccaaatatattttcattagaatgtaagctcactgagaacaggtagggctttggatgggcattattgctcctggtatgacactcaaaactgcagtcatgtttcagaagtgaacttatcattttacatagatttttctgcttcatattctattcagaatgatttgtattaaagttgatggaaagatgaaatccacattaagattgttatttactacctagtgccagttgttgtagcaaatatcctttgaaccccaggtctattttatcctatctgttgatcacttcctttgcccctgctcttcaagcctcctcatctctgaaaagctctccttccactgggtgtggtggctcaagcctataatcccagcactgtaagaggccgaggtgggaagattgcttgagcccagcagttagagaccagcctgggcaacataatgagaccccgtctcttaaaaaaacaaaaacaaacaaaaaaacctccaagtgaacgaacagtacaacaagtaataaaggatataaaagatgttctcagatctcaatatcaagtcagaagattttataataatattataattacacggagactgtccaaatatttgtatttgttgtgctacactgcattatgcaccatttagggaaacaacagcctaagtaatgtggttttaaataattaatctcatctaccaaatacctgtttgatagtaaagttaatgacctgtcctcaccttatgtttttaaccattatggaaagagaaccacttgaaaatatatcattccactgacagataattacccagctgtgaagcacaggctggagactggcaaggagaaatggagagaagcctataaaataattctttctcagggaaggagtttattcctgccaaggctttgccatcaaccattatcagatttctctttcatcctccgaacagattctgggctcctttgatgtggaggtacataattcaaaaagttgggtcacttgtgacatgttaagcaaatttctcagttctggttgtgtctgatgtgaaatgagcacgttgacactaactgttcttgactactatgggactagataatcatttgctatttcctgtaggtacttggcgtgttgaatcattttaccatattttctcattttatgaatcactggtccttttccattggacctgaaattagaccctaatatgacaagtagagcatatgttgtctcttactttgttattaaccttagattagaattaaggaatataggtgctgcttttttcttaggtagtggcaaattttccaaaggtctcaagcccagagtataatacagagttgataaaataacctggtagagtatgtagagcatgccttgtctttcaggaaaaggaactgaaaaacataggttttccaataggtgtaacataggtaacatagggacataggtgtaactgatgtacattttacttgcacttaatagacaggcagtgttagttcttcgtctctcttcacaggctatacaactaccaagatccagagaggttgaatttcttgctataactcacagcaaataaatgggagagtcagcactacagtccaagctctcttgattattggtccagtgttttttacagtatacacaaaaatttgttttaaaacaaatattcactatgaattagagacaatagcactaaaaaagaaactcacagctatcgttgtgttgacagaggagacaaccatgacctagtataggataaatctccatgtgatatgttttctactttatagtagtagtaggtaacattcttacatattattcctgcttaacaaagaattactgttcagcattaacataagtatgctctaaaatctcttgactgtatccaaatatatgttttagacaagagttttttttttttactgacctagcaaacaaaataaaattatcttaaacattaagcgtgttaaaattcaaaacaaagcttgaagagagaaaaatgcttgttatgtgtggcatacaaccttcctaacctctttatcagatgaaggatccagtgtggcactggattatttttctgtaatattttgcctcggacatatgtgctatacatttcttgtctgcatggggaaagtatgtcaggttgctgttgccactttcttcccatggagtggataatttcccttgagaataagttggctttctcatctcaccctttgcttttggtagtacctctggaaccagagggtaagattcatcttaatcatgtgaacattttattaattatctcatgtgtgattcaagcacatcattactgttactcaaggagaatattttctttgcaaagctttcaaccctttccatttgaatgactgctcttcatggtgtaatagatccactgttgaaattggcacttttctgtacttgtctctgaccagcaaaggcaaggaacattgcgtaaaataaattactgttgaattattggggcaaagtcaggttaatagcttaatccaaaaaaggaattacaagtgaaagaattttaccttaaatgtcattctgtttcattttgtaattaagaccttccaaatgtgtaagtagtaatgaccagaaatcttatcagatatggtcaaatgagaaaggtattcaattcatattaattttgaattttattgttttaatacaattttaggaaaagcatgccttgttttctgggtttcttggctgcctttgtatcaattatctacagctatcttctttagcatggaaaggatgtatttgaatactgtgacattttataccagggtaattctttgaatttatgtaaacaacaactctcttgagacacatcagtacaacacaatagtcagaaatgtcacatgagagttcaccaaactttaaagatggcgatgaggatggaaaaacatttttattgtagactttaaggatcttgtaaatccccgtatgtaatccagtgtgctagagaattggtgcccatggcgcctcctctccccaccgacctgcactgtggaaatcctactaattttgaagtcatgggagatgcatgtgtgggacctatacatgcactgtgatgagaatgatgacttcatcattctcattatttaatgagcccagctgctgcatacaagaaggatgcaaattcttgaatgttcttgattgtttacatcatggtctcataaggaatgaccagaattgctgggcatttcttcatcaggaaaggctaatcagccatccttggagagacatcagactcctttatatgtggccttcccatgggacctttgaatggtcaacgttaatcatgcttcagaaccagcatactaagtaaaagaaaacatgtccggaaaagaaatcttatcagtgtttatctcccaacagtgggattacaggtgattttgattttatttaagcaattttctatgactttgtataataaatgagtagcttttataatcagcaaaagatagactatgaaatcagtacatataattttgtatttgtatgtagtaccattgaaggataatagaaaaaagtcaaaagacttgaaagtcgacacagaatgatcattaatttgttttatctcttggtagttgtactttatgagctttatacatacagtatgggaaaatacactttagttttgaaaacaccatgatgccaaaataaaagaaaataacgttcattcatacgatcttcaacaaaatttaagcagcattaatcatcactgattcttcaggaagattcttgatcttccttaattttttttccctccaaaattgcatatggcagccacatttgtttcaggccagaaggaagaatgggaagagcttacatttatctcacagattccttctgggtgaggaagacttagaaagtgaagccctcttccatttgattaagcaagaacacctataaaaatggtgtcttcggccgggcgcggtgctcacgcctgtaatcccagaacttcgggaggccgagatgggcggatcgcaaggtcaggagattgagactgtcttggctaacaacggtgaaaccccgtctctactaaaaatacaaaaaaattagccaggcgtggtgcgggcgcctgtaatcccagctactcgggaggctgaggcaggagaatggcgtgaacccgggaggcggagcttgccgtgagccgagatcgcgccactgcgctccagcctgggggacagagcgagactcagtctcaaaaaaaaaaaaaaaaaaaaaaaaaaaaatggagcccttctaggtaggtcatcctccatggctcactgcagcacttccttggccctgtcccaagttccataattgcctcaattgcattggctcctgcttgatttgctttctaaaactcaggacagaggatgagttgaggagactgacttttttaacaatcgcattttgaaaagaaggaagcgtagtggtgtttcttggctccgtttccagttttgtttcttttcattttaattattgtacctggtattgtgtcctctttctgggacttttaacaactaatgttttgattgataagagctctaatagcatgggtgatttatacttcattacatcttcagttttgtcttctttactggagttgtattcaggtgtcattaagtaacgaggcattaaaaagaaacgataacttttgaaaaactgctgttatggcttatgagtgggctttgctgatattttcttgaagcacagaatttatctatctctgtaggtcctagatgataggtgagaaaaagaaacccagcttatttggcatgatattgtcccaaggcttgttagtaattgctttgaaaaatgaatagcaaggctaatggacatctgatttgtagtacatgctaagaattgcaaatgtgtgctcaaaagaaatttctctgattacaaaagtaacatatattcaacgtacaaagttgagaaaatacaaccactagctaaaaataatcaaaaccatttggcttccttgcagtctacatttttttcatgtatgttttgcttttgtttttagtgttatttaatcgtttcctgttttgtgacttgctttttacacctaacatttttagaatactctacctgtgaaattaaatattcttggagagcataatttttaatgtagcatcacaccagacactgtaatgtgtttactcttttttatggtcatttaggtggttttctttattttgtggtggtgtaatagttgttataaatgatgctgtgataaacatcctggtagataaatttgtgtttagttgatttttatataacagttattggcggaatgccttgcaaatcttatagttggtgtaataaaatatatgcgccacataattgtttatgaaaatatggaggaaaattttaatactgatttatgatcctgagtttaacataagcatggatacccctacatttagctatgatttttttattgatagagtaaaagcgcctgtaatttctacttaaggccatttaaaataattactatttaaatctatttaaacaattttaaatattgcttttccaaatttccaccttaggaagtagttaattgaatattctcagagaaataagtcctacaaaattgaccaataaaaggtcagttacgtattcattgtgtacgttttattgatcacccacagtgtgtgagcccctggaggtgggtgaaatgtgggcctccctcttacagagttgatagtgggcctgaaggggatgggatttcagctcaggaatttaaggaagacttgacaggaagtagcattgtgagccaagatttcaaggataagatttcaaggcaagaaaggagatgtattttaggtattcagacagagggtcaacaaagtctttaaggtaggaactagttcacttttcaaaaagaagaggtaattggtcatgataagagtagtagtttttaaaaatcattactgttttcattcatttataatgaatactattattttataattttaaagtttatatccaaataattgttttcaagatggtaatgaatgtatattgcttttatgtatacacatagtactttttgctttttggtaactaagtttataatttttgagggcaggaaatatttttgtttttcacttacaaagaaactatattttaataagagttttttgacagcagtgctttatgccaaaggaaaataaagcaacatttaacatatcaaagaaagccaatgcaaaacaaggattatttatttatttatttattttattcatttttgagatggagtttcactcttgttgccccggctggagtgcaatggcgtgatctcggctcactgcaacctccacttcctgggatcaagcgattctcctgcctcggcctcctgagtagctgggattactggcacccgccaccacgcccagctaattttttgtctttttagtagagatggggtttcatcatgttggccaggttggtctcaaactcctgacctcaggtgatccacccatcttggcctcccaaagtcctgggattacagacatgagccatcatgcccagccaaaacaaggattttatattcaatcaaactgacattcagatatgatcacatgaaataaatatcaacgtacaataactcagggcatattttcacattattttcctgtagaatctgctagagaacaagtttcagatacccaaaatacctagagaaaaactgatataaggatgggtaatgagcattaaggagaaacataaaaactaagactcaacgatggtaaaaagtatgataatatagtattccacagctacatgctgtgacaataaagagattctgtaactgtcaggcctctgagcccaagctaaaccatcccctgtgacctgcacgtattcgcccagatggcccgaagcaagtgaagaatcacaaaagaagtgaaaatggcctgttcctgccttaactgatgacattccaccacaaaagaagtgaaaatggccggtccttgccttaagtgatgacattatcttgtgaaattccttcttctggctcatcctggctcaaaaactcccccactgagcaccctgtgacccccacccctgccccccagagaacaaccccctttgactgcaattttcctttacctacccgaatcttacaaaatggccctaccccatctccctttcctgactctttttcggactcagcctgcctgcacccaggtgaaataaacagccttgttgtgacagtaactttaatggggaagaatgagaagaagatgtgggtaaagaaacaactgtttttctattaatggtggtagtattagtgtgtaattctgagcctggtgcataagtaatatggtgtaacataagtgaatagttgtgtgatattttaattcaatcatcccatgtatttgagaatcagaattttgatgtggtaaaagaagattcacatgtaacatataatctattaaaaagataccctgtagtcatgagtttgacttttaggtatcatttctcagtataacatattgttgtagatttcagataacattttttccccataaatactgtccgctgcaggcctaaaaataatgaaaaggcctaaaagaccaactcagtagcggtaaacaccagtactgcacctagattatggtctttaggaaccattttccagtaaaagataccagtaatctttggaaagcaggatttttttttctttttttttttttttgagatagagtctagcttcgtcgcccaggctggagtgcagtggtgcgatcttggctcactgcaacctctgcctcctgagttcaagccattctctgcctcagcctaccgagtagctgggattacaggtgcctgccaccactactggctaatttttttttgtatttttagtagagacggaatttgaccaccttggccagtctggtcttgaactcctgacctcgtgatccacccgcctcagcctcccaaagtactgagattacaggcatgagccaccacaacccggcggaaagcaggaaattttttaaaagctattttaattcagtcatgtaaaaaaaatgagcagaaagaaacaaaaaacttaaaaaaaaacttaaaaaatgagcagaatcttaggaatcacctgcgactttggttattcatgcttagccatttctataggaaattccagcactatttgagttagaccactaattatatgtgtgttgtagctttctccaagagataatggaattcacaaatcaaaactttgagattattaagtgttacaagtgaattataaccccagtcatttgctttcaaatgaacagctaaacatattttgtgttaatttcttatggatgctgctttgtttgtttgtttgtttattgagacggaatttcactcctgtcacctaggctgaagtgcaatggtgagatctcggctcactgcaacctctgcctcccgggttcaagtgattctcctgcctcagcctcccgagtagctgggattacaggcgtgcaccaccacacctagcagatttttgtatttttaatagagacagggtttcaccatgttggccaggctggtttcgaacttctgacctcaggtgatccacccaccttggtctcccaaaatgctgggattacaggcgtgagccaccattcccggcctagataggcttttagttggtttccatatacagtgtatatagggagaaacagactaagacagacactggcatccacagaagtaaaaataaaaagtaaggtataatttaaatttcacacggtcatggtcacatttttcagctttttgcacctatgttgtataaaaaagacaaaaatgcctttagaggctcaagttttcaggacttcctgaagctgtgtcatagtttaaaaatgccataaaaatgccgtcagatttaataacgtatcagctgaacactggatttctgttatgttgagtcttcaaaaatttctccctgtatgaggaattaatactgttatgtctgatctggtggtctgaaatgtgaacttttctgggccaaccagtaaacagctgctgttgctttatagctgcgtaattcagtcttggaaattattagataattcccacaccatttcagcttgctgttttaccataaatttaatgtgaacagtatttctagctaacctcaagctgtgtttattgtcgtggaattttctcttttattctgaggtaaatgattacaaatggttatgatgaggaatcaaagaagaaagtggactttcttcaaagttctttttctactctagccgcttctgagcatctttctcaagcactgtgtttccatcagtccctaccccaagcagagaaaggaaacagttttcccctttgtcttcagaaccctcttctcatcgtgtcattttccaaagcaaataaaaatcttgagatattgtcttgagtttgattttttttttttttttttgagatggagtttcactctttgttgcccaggctggagtgcaatggcacaatctcagctcaccccaacctccgcctcctgggttcaagtgattctcctgcctaagcctgccaagtagctgggattacaggcatgtgccaccatgcccagctatttttctgtttttagtagagacggggtttctccgtgttggtcaggctggtctcgagctcccgacctcaggtgatccgcgcctcggcctcccaaagtgctgggattacaggcgtgagccaccacaccctgccgagtttgatgttttttttaaccattcaagccagtaaataactttccagacagctgtagtagaaaacagaatttgtgtgtgacaaaacttaagattttgggattgagagctctatggtttatgccatgtggataattgtagccagatgaagaatatgaaatttaaggaagtgtttagagtggtacagacagctattattacgattcttggggtagaagagtagcttacatacaacataaaataatggcattaactgaattaacttcagcctttgccatgaaacccaagctttcattatgttttaaataatgaactacattaaaaatagtatataaatatgtaaaatatattagacatagacttctcataataaattatgggaacttttgatgtatttcttccctaggaaaagaactaaacaagtgcttctttgtggacttaaaatttttcagtttactattgtgaattaggtacagcatatctttataattccagataatacccataaaagcagaactgtttatttacttattatgaagggaatactgaaatgaaattaaggacaatttttttctcacgtattatatttttaaaaagttatttgatgtttgtgattaaataaagaatgaatttttaaagccagttctcaattagcactgaggaaaagaatatgctttttttcaggtacacaaataagcatcatggatataagaaacgacataaagatgaatctacagtctggattaagacgtattttaatttcagtgtcaaaggctgttaggaaatattcagattttagtacttgacaaagaaggttctcaatatttgtttcagtgttcagtgaaaggataaattctgtcgtctttctcttttatcatattagtcactgagtggtttcattaaacattccctcttccatatcccctgataaatttcaacttgttggtgatgcatcccaggagtgtctgtctttttttttttttttttttccttctcctgtcagtgagtcttaggctttggctttgaaaccctatagtgaagggaaatctcaggcaacagctgtgcaaccgtctggagagcagctagtccagattggaggagacgaacgaggctggtcgcaggagagaggcctccaggaaaaaatggcattgatgcattacctgcgttaaagattttcctgtacttagcatgcttcttagggttctactggagcgtttgggaaagatacagtattgatggatgcatagaaaatgaggcaaattttttaaatggggcaaatattaactgtagacaaagaaaagccaaaagtacaaaataacagcgttgtaagatacgaagataaaaatacgcctaagtatgagcgttctggcagactcacaatacagatgccatatatggggtaaaaccataccagtaggatggtgggaagggaaaggggtgggctcatgttccatagtgggaagacctacagcggaaaaatcaggagaatagttatttaagcacagagtttagggagtaagttgcagaagagacaactaaatgagatggccgtgaatgatttttatgacctcctcttgttatggagaaatcgatcaaggaggcctatatttgatggcaggaagaagttgagtttaaggtttccagacatttgttttaatctggaaaatttctttttttctttctttcttttttttttttttttgagacagagtctcactctgtcgcccaggctggagcgcagtggcgcagtcttggctcatcgcagcctccgcctcctgggttcacgccattctcctgtctcagcctcttgagtagctgggactacaggcgcccacaaccacgcccggctaattttttgtatttttagtggagactgggtttcatcgtgttagccaggatggtctccatctcctgatctcgtgatccgcccacctcggcctcccaaagtgccgggattacaggcgtgagccactgcgcccagcctaaaatttcttttaagcttagaagttgcaagtcaagttactgttaaaggcgtcctaactttgaattagataaagctaaactgtggtttaattgagctgagtttgttgtatgctatatctcaacttcacaagatgtttgctttttcttggctataacctaagattatacaaatataaaattacctttatgcccatttgatagactttagggctgaatttccctgtgtaagatgttgtagaggtttgtacttgtgattgtttttactctagaagcatgtttatcttcactcctttagtgacacgtgtttgttcaggaacttcaaactcaatgtgatcaaaactagactcatgttccctgaatagtctctcctgactacaaatctgttggaaacttccaatcctaattaataattgtaaactttttaatgtaagtcatatgaggggttgttgtgagcataggaggtagggagatggtagtgtgagctggagcatatggtaaaagttgtttgaaagaaagtagacccatgatgtggatcctgagggatacgtaaagaaaatgaagaggtgtagatttaaaaatgtttatggggcctgggcgtggtagctcacacctgtaatcccagcactttgggaggccgaggtgggcagatcacctgaggttaggagttggagaccagcctggccaacatagtgaaaccccgtctctactaaaagtacaaaaattagccaggcatggtgatgggcgcctgtaatcccagctactcaggaggctgaggcaggagaatcacttgaaaccgggaagcggagattgcagtgagccgagatcgcgccactgcacgccagcctggatgacaagagcgaaactccgtctcaaaaaaaattaaacaataaataaataaatatattcatggggatgttccagggaaagtagtttgtgttggtagccttgagaaataataatagaaaattagaatagaactaagttggttcattaaagttggaacacttgtagagatttttgatttggacagacattaattcatttgattatttctcttattcgatgtccagaaaaatatctgtacattcaatgtggttttatttgtactgcacatgtcattaataggctaaagttacctctaagatacctgctttcttagtccttgttacgctgtaaattctgggcatcaggatatagctttttattatgttagctcttttaatagatgatacaattggattggggaaaaaactgattatactctggagtaatactttcatagcctgtagtatcctgcaaatagctcctggtcatcttcgaattttactagcaaacttgtagggtaataggttgggacaaagtattataatcagtggctttgagggcctgataagaggaaacaataattgtgcagctatattgtgaataagtagtgcatgatgctgatggttaaccctttcctgcggtgctcaaacattgggaaataattgctttttgttcaaaatgtaagctcttcgataattgagacttttgtcaattcactgaaatattcccagagcttgaacatgtctggtacatagtacatatttaataaatatatagatttaatgaatgaattgaggatgtagccaaatattggaaaaggaaagggaaaagaaagaatagcccaaacattagaaagacagaagatgtggagcagcaatttcacatgcctaaaagaatttctgagattatggcaaaatcatttactttacttactccttattgatcaacaaaggaagagcaggttttatgtaacaaccaagaagtaacatagggatctcagaagagaagaaaccaagtgtctttggatcttaataaaaagaacattcaactccagaaatagggttaaacctatcctacacatgtctagtaaaaagtcagtgtatcagaggcatctgtgtttagagataaaacataccattagattcatttataatagtttcattgtccttagtttttaaggctaatgataaagatttttttttttttgtgagacacagtctctctgtcacccaggctggagtgcagtgacgcaatctctgctcactgcaacctccgcctcccgggttcaagcgattctcttgcctcagccacccaagtagctaggactacaggcacacgccatcatgcctggctaatttttgtatttttagtagagagggggtttcaccatgttgcccacgatggtctcgatctcctgacctcaacagatctgcccgcctcggcctagtgctggaattacaggcgtgagccaccacgcctggccttaagaattaattttcacagaaatctgcttctaaatattattcagtgataatagattttagaaatttcagattcttatgttgtaccttaaaggttaggatactatttataaatgctaaacatgaactcctgtcatcctattttaatgtctttattaagtgattacatgaatgtggcgtttcagtaggtgtttggtgtattaatagatgtaggtactcccctcttaaacctttaagtattttcatgccatgaaaaatttggggggcattctctttatttattgattaggtacctgtattttcaagaatattactcagcttcagttcccccaaatcttttttagtgttaactaccttccgagaacgtggtataacattttaaaatatattttttgaaggtttggatgtcactgaagatccccctatttattggatggtatctttatcagctgggaagataattagtttcccaatgttgctatatttttatgaataggtcctgtagctcttgctttcttgaaagcttagaattgattgtaagccatggactaatgatattctccaagcatatttaacatgaataggctcatgttcagtatgtcaagaagttaccctgttgtactatttaaataatttgagcttagttttctttttccacctttgttctaaattcttaggtgagtctgaattcctgggcatctgtgcacacagcttcttcagtaggtcctttactctcattgtatctgatctttgacttcataaagacccttggcctactgaccctgtatttaatttcacatctcaatagtatttagccttctcatatttttcctcttctttagagctccctgatccctcactccagtcattcaactctgtgtattcctttaacttccaccctcgctctgtctcttcacagatatgcttctttatatggtagtcagaagttcctgtgtgatcttcgtaacctccagttccctccacagtcacctgttatcaggcatctgttccttgagctccagggaatgagctctttgctatcattctggttgtcggactcactgggcactgttgtgtcctccacagtctctcagtggcatcggttgatgggtgcattctccccacactgatgtcattctgctgcttctgattttctttctgctgtcctccattttcctttcaggctcccttccccgtcctccccgcgccaccttttgcaatatttaggattcagaaattccaaatattgcaaaatatttagaatcagaattcagaaattctaaatatcagtgtttaataggagtaccctggggttgtccattttctcacacaacacatacttgctaggagatctcataagtgcagtggtttttcagaggcctgcattgatgattcctgagtcattatgtccaggccaggcctcatacatactatttactggttctctttctgcgggtgctccaccaagaattcagactcaatggaatatttcttctaagatgtacaccagttccttatcaaaaaatggcaaattcagacttcttaggttaaacagagaactcgtgaacatggcatatgtctgttattccatttttctctgttggcttattgctgagtaccatttgggataaaaatctgtttcaggcaaaggataggattgttttcagcttttattaaattctcctagacccttgattttatgcagagaactaattaaatttgaatgaatttaatgtagaaaccctgctattgatgcagaaatcaacctgattctggactagcaccagaatcaactatttttgttgtttttgctttctttttttttgcttttgctttctctgccggtaaataacaactagtatgtaagaatcaaatgaatcaagcataaatccctaggaaatatttatgcattcatttttaacaatttaaagatgtgaagatatataattaagcataatcctctcaaagtttgacgttgaaaagtatttcagatacttcaacttaaatatattttttgcaaaatatcttttttaaaaaaacagatgtggtctcagcaatgtaattattacagtgtgaggagagcttacagttgtaccaaaatttataactaggaagaagagaatgtgaaataatccggaaacctacaaaactgtcctatacaggaataccaattaaacagctactaaaaatgagtgtaaaatgacaatatggctttatcaagtgcttagggtctggaaaaatgcacatattgcctgttatttattgttatacttaatgaatgttcttttgcacgtgagaactgttataaaagatgtcttttgtacatacttggtacaccagttggctttttaacccattagctgttttcccccaaaggtggcctactctagatgacgttaaaaatacacattttccagggacttatataaatagtcaactgccctattatggaaacttaaaagcgaaggccctgaaatatccagacagtttgaacataaaccaaaaatgaagtgaatctctagaattgctgtgtaatagcgtgagtggggagggggtccctcaagagagggaactgacctttttcttcctcgtgggtgaccttgagtacacactttatttagtcattaaaagggtcacctgaagcttagagaatgaagatcctacagcctgttaattttatcattgttagaaactctctgcctttggcctgaaaatggtaaatcacctttcttagaagattctcatatccagatattcttaccaaatcagaatcttttccagcattttcttcaaaaaaccacagttctgggttaaaacacagcagatcctaactgtaattttcctttcatgtacattttagtcatctttataattttaaatgaaagacaggaactacattatttgaaataagggttaaccccctctaattataagcattaatcacacacagttttctcatttctaaatgttaaatataaaatgggagctatctcttcagacacttttctgttgccttctgtgtgcggcaggaccttacttttaagcttagtttgatttaaaggctgagtttctgcttgcttggaatgcttgctcttcaaaatatttgctccctggagagggaaactgaagatggagctttcacgtgactttggattgctgacctggaagacgtttggggtaataggatgggctagggcatggttccactgctttctgtttgagtggggtcaggaaaggaaggcggggctcgctgtgtgcaaacaggaaaacatagtctgaagatgtttgaagcctgagtgcactttcatttgatgccttgctttattgcttaagagaattttaaactgccgaatccgcaaatgtgctgcagcctataatgacacatatttaaatgatttttgcatctaaacaaatgcattcactctttgcctggtgtgtacaatttgaatgacactcgtgctctgcctggaaggaacagacgtttttcattataaaattcagtcaagcagaaaagtagcaaaggaagcagaaatttccatttacatctatgattgaagttgtagtgataaaagaggatgactaagttgaagagtagccttgttctcattctgctatctgacatgggatcttgtcactttggtaatagtttttaaacttacattattgaggaaggctctgatcagaagtctcaaattatacatgttcttcaaccttagatttttctgggtgttttgtttcaaaagtctcaaattatatatgttcttcaaccttagatttttctgggtgttttgtttggttttttggttatctatagatagatttgagtatctctttttttcttaaaatccgttacttactagtaataaagacttaagtggtagctttacgctccattatcacagagattcacagtactttttagtttttacttgtgagcctcagcaggtgtagacagataccttagttgccactgataacatccagttgccactagatcaagaaatggttcaaaattctccaggggcattttctgctaaagaagagttggtgatcttccttttggaagccttaatgtacttaaaccttcttccttagaagtccagaaattcaattatttcagctctctgtggagtgataagtcctgccaaattgatttacaataatgaaactaagccttgtttacaaatctaagtggtgatttctaagtccacagaggcgtggtaacagagagagagattctgatttatctgggggtctatccgtgtttgaacagattgtgtgatttttgaaacatgattcaaaagggatgttgataaattctaaaatacatttttattgaagagcttgatgaatcatgtatacttactttatttgttattctattagatattgtcttcctcatccctaggtggtgttgctagtacagtgacagaattcaaatccttctttttcctctgctctaacagagctttgtgaactcatagcaatattgtaatgcctggtaaaaggtggtgccagtttcaagtactatatcctaattacttcatggctaactcttgttattgttaacaatattgttaactcttttgttaaatgcagtgacatcttttttctttctcattctctgtgtactttttgccctaaatagttctgcatcttttaagatacaagtttgctttttcttggaggtttttatttggaaaatgcctgaaatatatagaccaacatttgttcctccaatggttaaattacattgtctcccaaagtgaggcattttaagtctggactatacccaggagaatctaaaagaggcagttaataagctcttgaagagcacagtggggtggttgtgtatttattgagtctcacacttaggagagaaataggctggaccaaatgagcctgggcatcaaaagcatgtgggtggtcgttggtgatatgtgcagtgatgagtgtgtgtgctgagggtcctagaccaggctggcagggaaatgaactgaaggcagtgaagcctcccctgataactgcagagagtgctgcagcatccaggacctcaggatcatgatgaacaagctgtagtggatggaagggagaggaactatgggaaggatgagtttctggccagaaagtggtttactggagtgctgtgtctgagtattacatgatctgaggaccatgaggtccagctttgggagtatggagagtttgagtggagtagagttatagtcccatggtcttctgattcacagacattcatgagcgataagtatctattgagaaagtggaagcatgatttttatgacctcctcttgttgtggggaaatcgatcaacggggcctatattggttgggttctacaaccaaatagaatgtgttcagcaggagtcatgttttgggctcctcacaatgttcagtgttagttctgttcctttctcttgcttccacataggaaagactttgacccaatgaggaattagtcattgtcctttgggtacacttccggaatttgataatcagttgggcacttgattctagtacatttgctaaaagtaattaataccctgcaattggaagcatgcagcaagcgactgggaatgctaagtgaaaggtcagaattgaaagagtggaggaggctgttgacccttaggcatggatgatatgtctgagtgagaaagcaagaagagtagaagacagagccttactttataatcagaattatgaaaagaggagccaatgagagggaaagaatgattggcttgagatagattggtggaaactggagaagattgaatttaaagaagaaaagtgggccaagttcagtggcccatgcctagaatcccagcaaattgggaggctgaagctaggagagttgcttgaggccaggagtttgagatcagcttgggcaacgtggcgagacccctgtctctacaaaaaataattaaaaaaaaaattagccaggcatgttggcatgtgccggtagtcccggctacttggaaggctgagacaggaaggttgtctgagcccaggaggctgcagtgagctatgatcacagcactgcactccagcctggttgacagagggtatccccgtctctttaaaaaaaaaaaaaaaaagagaatgtggcagagtagtcagagaactggagggctgagaagagactgatggcatttgttgttcttgaccttgaaagaagagttgcagattgttggagcaaggccagatggtaataggttggaaagaacaagtgaggggcgtgagagtgacagtctacaaccccgttaagaagttatctgtgaaaatgcctcttcctgtcttgattatagcctccctcgcacatggctttctgagtatggtatgtgaaaacagcatgctgtatatttttaccttcccatatgagttaaggttttggtaatgacttgtggttcttttgcctcacggaacaccaacctggttggtattttgtcggcaattatgtggtttttaaaaagccccgtatataaccttaattaattgcgtctctaaaatctatcaggctttgagttttttgttttttttttttaaataaggcagaaagaaaggaaagtgttaggagaaagcaaccagtgagaatacctatattttgaagaaacaaagtagggaatttagaattatctctactatatctgctttttcagctcatctctcgggatacagaggactgaactaagctaaagtaggttcaagtctaaaggaaaccttaaattaatttctgtattagaattaatcacacacctataaatacaatttatgatatgagaactgcaacaagagaaatggggggagatgagcagtttgctgatcaatagggttaatgatggtaacatagaatcctagtgatatgcctcccattgactaaaatgtatgcgttaagatagcatagcgcataaaatggtgtactgcagtctcagtgtattcaagcttattatggtttctctgcctaggtttgtgtctttggctttagattttctcccataaccccaacctgtccacattcaagtcactactccttgaaatatattattgatctctaaaatctgatgctaagtctgtcttgcccaacggtggccactagccacccatggccattgaatatttgaaacctggctagtccaaactatgctgtgagtataaaaaacccaccagatattaaaaagttagtctgggagaaaaaaacaaatgtagaatgtcttaatgataattatttacattgattgcatgttgaaatgatgaaatttaggatgtactgggttaaaatatattaataaaattaattttacctgtttctttttacctttttatgttaatgtggctacaggaaattttaaattagatatgtggcctctattatatttctgtgagacaaagctgctccaagctgttttggtccagaactatatctcggttcttttgtatcctacatggacctgcatagaatggtatttagtaatactcagcagtagcagagatgatctcttatcaaattatgttaagttttaatttttattcttgtctctcaccctatgtgcacctctctggccaggaggcatttatcatatcaccttttaatatttggaaatcacttgatctgcttgagtcattgtgttgttttcaaatctagaactctttctaccttattttgtaacttctataattaaacaaaaggcgaaccaggagcagcttggctcttagggatgtgtgaaaaggcgctcagtccttaagttggtgccaaaagtgacaaatctataggatgagatgcaggtttatggaagagaagcatgaaaatttttattttttaaaaggacacagcaagctagtcaccaaaagacagatacttgattctacttatatgcggtacctttttgaatttgaagagtcaaattcaaaaagatggaaaacagaatggtggtttccaggttctggaggtgggggaatggggagtggaggtgggggaatggggagtggaggtgggggaatggggagttgtttaatggtgtgcagggttttagtttagcaagatgaaaacagttctggagatggaaggtagtgatggttgtacaacgatatgaatctacttaacactaaactgtataattaaaagtgggtaagcaaagagtgtcttacaaagcaataacttgtaacttaaaatttttaaaaaccttaatgagattagttgtaatgggttatcttaagtagacccttactgccggaaggaacagctgaatcacatcacttgggagcttgttagaaaagcagactcagtcccaccctagacttgtccaatcaaaacctgcattttaacaaggcccccaggtgattcataggcactgtaaagcttgagaagccctgctccaaatatcatttctcaaagtgtgatccatgagccacctgaagcagagccaccctgggaaggtctgttttcaggcgcgtcccagaacacgtaaatcagatctaggctgtggagctagggagaagatgaatctgcagactgatcaggatcccaggtgattttgaagcatggtttgagtttgaaaacccctaatctggaaagctttaacaactattactcttacaattccatcttttaacgaatgttggaattattaaatacttgtaacaagaagtcctgttattgataaaatcaagatatgactaatagtgcagtcaaaaagaggcaacaaaaaagcacctataacttatcttgggttggttaatgaggaagctgtcattcaaaattagtaagactactgtaacatttcttggggtcctgaacattggaatgagagtcggttttcagagttgagcccacctctgtcattagctttgtgcaaacctcatcaggctcaagattcctcatttgtaaaggggaatgaattctctgaccagttagtttacattcctaagacaaggttaaatttggaaagcaaagaattttcggtatatatgtgataattttgaaattcttgaatttttaaaaaatttaaatgccacattacttatatttttttctaaaaaaaagtcaaaccaagcgctgtctagttattaatagataccacagatgagatgcctgagttggtaagctctttttaattctagttcttttcaactacaataattttatagacttttttttgaaggctagaatgttgatgtggaatcaaataggtatgcctctatgtatggtagatgcacctgacagggatcacttgacttgaacatgccctgacaatgatcctgtgtggcaggtgcacctgattctgagttctgagttaagaaatccgggagtgggccgggcggggtggccggtgcctgtaatcccagcactttgggaggccgaggcaggtggatcatttgaggtcggaagtccaagaccagcctggccaatgtggcaaaaccccgtctctactaaaaatacaaaaaccagctgggcgtggtggcgcaggcctgtagtcccagctactttggaggctgaggcaggagaattgcttgaacccgggaggtggaggttgcagtgagccaagatcacgccagtgcactccagcctgggcgacagaatgagactctgtttcaaacaacagcaacaacaaaacccaaaacaaaaaaacaacaacaaagaaatccaggagtggctaacccagagagccattccttatctgtaaggaacatctgagccctcatctccttctgtggaacatgggcctcgccggggattgagaccctttgttatgagttaagtggaagttgccaggtggagattgttagggggagggtgttaaatgagaatgctgtagagaccacatgccttttgcaagcggctgcggttcctctgtccaacccaccaccactggactctctaccctgtatgcaagcccccagtaaaaccctatgagacatacggttcactagctctgggcctcttctggctcttgaacctggtgccatccacattgcagtcagtaggagtttggcatgacaccttattatgtgaacttttatatcaagccattaaatttttttaaaatagactttatattttacaacagttttaaatttacaggaaaattgagaggatagtccagagagttcccataggctttgcatccagttttccctattgttaacatcttatattaatatggtacatttgttgcagtcagtaaaccaattttgatacatggttattaactaaagtctatactttattcagatgtccttagtttttgtctaatgtcctttctgtgttccaggatgccatccaggaaggcgcattatatttaattgtcaggtctccatagcctcctttcctcttggctatgacagtttctttatacttctctagttttttaataaccttaaaggttttgtattggtcagataatttgtaggattcccctctgtgggaattttctcatgctttgcctggggttattggttttaagaaggaagaccacagaggtaaaatgcccatttcatcacatcatatcaagggtacgtgtttatcaacatgatacagccctgttggcattgaccttgatcacctggctcaggtggtggttgttgagtttctccacttgaaaattactcttcttcccactttatgtgctctactctttggaaggaagtcagtttgcacagcccacaattaaggagcagagaattatgcttcattttcttgagggcagagtatctacataaattatttggaattcttctgcgcaggagatttgtctcttttttcctatttatgtattcattcattcagtcatttagactcatggatatttacattgtactttgatttctaatccagcactacttcataatttttattgctcaaattattccggctttagctattagaagccctttcacttggttcctatgctcatttgacatagcctcttttttttttttcttacaagatgctgcagtctcatcttgcatattttcagccctaatcctagaatcagctgttcctccaaggagcccttgttccttttattggagagtaatgttattggagaatagtattaaaatctggatgttaaggatgctcgttgccactggagtttctttgcttttaagacttctcagttgatagagcaaggcaatgtatttgtccatgttcacccttatgttatgcagatctataaatatttctatagctaactagttgtatttatattaagctataatatctagtctatattaagctaaatacaagttcatccggatgtttcctactctaacgtattaccacatggacactatatctctcctccttggttatgtataaattctcactccatccaccatctatgtacttaattgttcagtttcagtatatgtgcgtagccgtatcagaattgttaacccaggctgggtacagtggctcatgcctgtaatcccaatactttgggaggctgaggcaggtggattgcttgagcccaggaatttgagaccagcctgggcaacatggcataaccccatgtctactaaaaatacaaaaaaattgctggtcatggtagcatgtgcctgtagtcccagctacccgagaagctgaggtgggaggatcacctgagcccaggaagtcaaggctgcagtgagctgtgatcgtgccattgcactccagcctgggagacagagtaagactctttcttaaaaaaataaaaaataaaaaatataaaaaaatttgttaacccacacctatatggatctttttaaaagctgcaagactgctaacaaatatttatttatttatttatttatttatttatttgagacagagtctccctctgtcacccaggctggagtgcaatgacacaatctcagcccactgcaacctctgcttccccggctcaggcgattctcctgccccagcctcccgagtagctaagattacaggcacccgccaccatgcccagctaattttgtatttttagtagagacggggtttcaccatgttagccaggctggtctcgaactcctgacctcaggtgatccacttgcctcggcctcccaaattgctgggattataggtgtgagccaccatgcctggccataaatacttattttgttcccgtggttttttttttcttttctcttttttaaagtaaatcctttgcactatttttattattttaagaccagtgttattcagagcctgggttaaacactattctgtgtgtgtgtgtgtgtgtgtgtgtgtgtttgtttgtttgtttgttttttgagacagagtctcgctctgtcacccatgctggagtgcagtggtgtgatcttggctcactgcaacctccgcctccctggttcgggagattcttcggcctcagcctcccgagtagctgggactataggtgcgcgccaacatgctcagctaatttttgtatttttagtagagacggagtgtcaccatattggccaggctggtttcaaactcctgaccttgtgatccacctcggcctcccaaagtgctgggattacaggcatgagccaccactcccggccagcactattctgtcttatactcactctgccatctgtgtgtgtatatggtacgtatgtgaggctggatctgtgcacttggaaaagttggagagatgatttaggtaaaacttttagttttcacttcttttgcctttttgcttatcttgatccatttagttcctaccatctggcaaatagttctcatctgaagaatcccatctgtcagttctcactattatccggtaatagttacagtgaaatgctggtgacggcaacagccactttttaaaaggatgtgtaattcaccctcatgtcctctttgagaacccagtaactgcccacactctgaagctaaaaccataacagttttatcacatggaaagtttgttgagaaatgtttggctgtttctgtgaagtaatcgtcccgtctcttgagtacagatgcctcccaggaaaattttcccagcctatttgttaatgtgaaagttacaaaagatagcatataatgagcacattcaagacaaaaaaatttgtggagtaagagtctgaaatggtaaaataaaaaatcacttaagaaaacatttatctgtagctgtcattttcatatacacatatctagtgtatacaagttagtaagtacataattctcaaaagttctacctgtctacacatctacacagaaaaattaggaaagtcttgtccagacttttccatcatcttcagtataaagcatcttctagctgttggaatagaaacaagctagattcttgactcctttctatttgattatttagatctgaccttcagacgacatccagaatctgagaacacgcaccacctctactgctctcatcctggtccaagtcattgtcatctcccacctggattaatgccagagcccccttcctggtcttctcacttctagtcttgaccccctagggcaagaataattagcttagaaaaccaccccagagccttccagcattactctgagtactggccagagttggacaatgtttaaggccccgtgcagtcagctgtccctgtcctgtcctggctgtcactcactcgcttgcccactgatctcttccacatcattcctccacgacagcactgatctccttgttcttctgtgagttcaccaggcatgcatctgcctcaagactttgtgtaatacttgttgcttcctctggctagaatattcttccctttgattctgaatactttgttccctcacttcctcaagtcttcactgaaatgtcatattttcaagtaggcattccctgaccaccctatttaaaatttcacccctcagaaaaaacaaacaaaccacccctttctctgctttatctatgtaacatttattaccatccaacagacactgtatttttatctgtattttttatcgcttccccgctaggatcatatatcgttttatctgttttgttcactgctgtattcttagcactgagacataattgtaagtatgcagtgaagagttagtggataaaggacagtggctgcaagaggggatttaggaaacaccccctcccagccaggaccagcactcggtgcaagagttgaaagagttgatcactcagattctctgcttctccagtcgtagggactccaccccgctgtgttgattgctgtcatgtattcaccccatcataagcagtactcacatgtaaaacagtaccatgtcatctctgtggggctacaagtaggtggtgatggtgcaatgaacatataaaaccccagtgtcttcagtaggtgcgaaataggtgattagtgaatgatgaagagtagctgttgctgttttgattactatgattattattatgagaaactactgtggttgatgagatagatactggggagaaggatactattaatataatttattgagcaactttgttctgggcactagttgagtactttagggatattaattcatttaattctcccagttctgccatttactctctatgtgacctggactgttacatagtctctcagtctcaccctctctttttttttttttttttttttttttttttttttgagacggagtctcgctctttcgctcagtctggactgcagtggtgctatcttggctcactgcaacctccacctcccaggttcaagcgattctcctgcctcagcctactgagtagctgggattacaggcatgcaccaccacgcctggctaatttttttgtatttttagtagagacggggtttcaccatattagccagactggtctcgaactcctgaccttgtgatccacccgtctcggcctcccaaagtgctgggattacagacttgagccactgtgcccggcccttgccttctcttataaagtgaaatcattgtagctgctttggtgtggttctgaggacggtgagagaagacgcacgtgaagtattgagggtggtggcaggcacacagttcagagttactaacaatactggtgttttatcttcacaaggcagatctgggcccatagcacaaggaaaccgaggctttggcattttacagtaattacattgccagaacatttcccccactttcttgaatcatctttacctcttgagagatgaggaagagagggcacacctcgggcagaagtccaaagacctcaggcatttttggcctttcattcccatgattctggccaacatcattttagtccccagcagttcatagaaatattgtcttttaatctgatattcaaataatctgtgccttgaagaacctgtgtatggctctagaatcttttacattaatctactcaaccccactctgatgctcaaaacttcagcagtctgttttttttttattttaatgtctttattattatttttttttttgagacggagtctcgctctgtcgcccaggctggagtgcagtggcgcgatctcggctcactgcaagctccgcctcccgggttcacgccattctcctgcctcagcctcccgagtagctgggactacaggcgcccgctaccacgcccggctaattttttgtatttttagtagagacggggtttcaccgtgttagccaggatggtctcgatctcctgaccttgtgatccgcccgcctcggcctcccaaagtgctgggattacaggcgtgagccaccgcgcccggcctaatgtctttattttaaacatttatttttagaggtagggtctctctaagttatgcaggctggcctcaaattcctgggctcaagtgatcctcccaccacagcctcccaagtagctgggatgacacccccaggtgccgccatcctggcagcagagtcagttttgatacatctttcccttctcattcttcccaatgtcatggattgggaagttactgtggttttagttgcagtactttttactctgaattctgtttgcttcctggaattctgtctgtcttttgaaaagacaacataaagaaatcgaaaaatatactttaaattccatagtgtgggagcctctgctactcgcctgtttgatattcattcccattttttcctttctaaaagaattccagattttttttgttcagggtgacaatgtgctctgctgaaaatactttcacagattcccttgcaggtgcatgtgaccagatcacagtaatggcacatatggcctcagtggaatttgctgaggagtatgtccctcccaagtaacagcaaagctttattagaggaaaaaacaacaacagaaaacctttcacctttgtcttgtttctcctgccttctgtctggaacttggacacagagtcttgaatttctgtgaccataaaacacgaggataaaaccaacgtgctcaggatggcagtacagaaagataggaatacgctggtccctgatggcatcatggaatatctgcagtggccctagcttcagtgtcacttcttaggtgagatacataatcctaccgtgtgtttaagccacggtttgacatgtggtctattctctgccgctgactgcattcccagctgttctatatggcttgctagctaatttaagtctagttttattgtcaaattgaccacattgtagattataatattaaagtacttcacagtctaaaagtgaactacttttgtaaaagccaaaggaaatgggccaaatgaaccattttgaacagagtttaaatgagtgagttgagttaccactcttggatggagaactggagacctggattttcagtctagttcttctgccagttggctctgtgggcaagtcacttgacctgagctcttttcctcccatctgcaaaatgaggtaatttgagctagacagtcctcccaaagaccaccaaagagctagcagattgaggcctgcagactcctattgaatttgccatccttgttcaccttgccaagacttcatagccaagaagccagacccagattttgttcattagctttgaaaacaccctttcagttgggtgtgtgtgtgtgtgtgtgtgtgtgtggtgtgtgacatgcgttttgaatataaattgtgaattgttttagcaagaaaccaggttgtatgtttctcaataaacatgcatactgtatattgatgaatttatccacttgaaataaatggtgccaaattgcctaaagtttgctgtaaacaggaacatgatttctcattatgatgtttaatttgttttagtctttgatctcttacatcagaattctgttaagaactctttttacctgaaagatcaaagcaaataagcagaagcatttataaaaataaggtatacgtggctgtggagagaaactccaggtatatacgatcataggctttttaaaattaataaactttgtttttaaaaacaaagcagtggaagttcacagcaagtttgagtagaaagtacagtttccatgtaactgctgtcctagcaaagatttttaagtacaatattttttaattaaaaagagaaaatataaaccgtgctaagccagttggtgaaaaaggcttcattatacttttagcactcttaacgcttattaaaagtttttaaaaacagatttttgtggttgaatcgcttacaatttctgatgtgtaaccttctaacatgtttcatcaaattttaaaagtaatgtaagcagtgctgtccactgctaaattttattttaatgttagaatacaatgaggtttctattttgccattagtcctgagagcttattaagtaaccagttttaatcctttaaaaaaccattctcattttgagggacacatatttcttagctttgtgcaatataagaagctaagaccatcttggcagtatcaaatgaaatgttttgcaagttagaaagttcagtaaccacttataaacataatgaacaattgttatagtcagtctaatgcagaaatacaggtgttgggggcaggggggtggtgggtgggcagacttggtccacaagtagtagtttgccaacctctgtcctaaacacaagttcaagaatatggttctcttggatagattttctgccagatgaaagtaagagtaacatccttagctaatgaactcctaatatccaaggcaacttttaattaattcaggcttttaagaaaagcttgtttaccaactcctcattaaaaatgttcagactggctggtcgtggtggctcatgtctgtaatcccggcactttgggaggctgaggcaggcagattgcttgagcctaggagttcgagaccagcctgggcaacatatctagaccctgtctctgcaaaaagtgaaataattagctgggcatgatggtgcacagctgtagtcccagctactcaggaggctgaggtgggaggattgcatgacccccggaggtcgaagctgcagtgagccattgatccaaccactacattccagccagggtgacagagtgagaccttgtctgaaaacaaacaaacaaaaagattaatgcagtacatgtccttttggtgaataagtaaatatgttttggtaactttagctttgcattataatctagtcgtcagcagattgactaagggcagataaaacaagatgatttggttttgtggtttggcacttactgtctgatttatgcccccaagaactcttgcaggccaaggtcgagtgtatctgatacctgctctggctcttctcacgaactgatttagtagctttgggccagcattagattttttaaactctttgacctatttgtacatgacaggcatttaatctttccagtagttacttgtcaaatagaaaagcatcacttcttagtttggacatttgcaaatatgactgagcagagctgacagatgaggtgggcatcttcaggccatagggtacttctggcctcctgtaacctagaaaattgggatgcctcagatatcaggtattcttccaagcagctagggttagtccctgacctcagaaaccctgagagccctcagaaaccctgagaaatccacctgggaatggtgtatttgttttggatgagattacctttactttccattctccaggtcttcttgtgttttttgtttttgttttgttttgttttgttttatatcattctatgtaaaagagaaatgtggtatcatttgcattatcatgttatttctttccttataatttatatcttaatgcttatctctggggctaggttataatctcctgagttaggtagccttaggtttcttggcggagattcctcccctgggaagtgaggtttataaaagaacccgtgatgtggccctgtggagctgcatggggtgtgtgctcagtactcactggtttcttccctgcaaagtgacacctgcagcctttggggtaccatgtctcataatttttgcattccctgcaacacacactatactgctatgggcatcattgatcattttaaagatttaaggaatgacaagatacagtgcttattctcccctatgatttgcttagatttttatctaaatagtacttattgaaataagtacttcagtatcatgctacatcttacatgtttgagctagaaacagactaaagtttaaacccttttatgagaatgaaaagttacttccttccccttcttagggcttttaatccctctttatgttgcatttcagaaaatgccctatagcgtactatgaaagaaagacattcattcctgtctttgctgctgtgtggacgatctgtattccttgctccgtgggagttgtgggtttatgtctattcttgcatgttttgcctgaaggaccacagtgacctacttggtggtctccctgctttcatggtttcactatgctgatctatccttcacttaattatagagtctatcttaaaaaaaaaaaaaaaaaaaaaaaaacttttggcctatgttgcttcttccaaaatggcatccaaaacctaagcctctttaaaattggagtccagcatgcttccccagtgctacttccttctggactccctttgccacttgctttctgcttccacccatatccagatgggctgcaaatatgccttgctggttctttactctgtctttgcacaggaggctccctcattttgaagggtcttttgctacccatccatccatccatttggattctataatagagttcttgatgtttgacagaactaggccaggaattgtgggggtataatggcaagcaagacagagtctatccttacgttatggaagttcaattcatttcccatgtggcatactacttctcaccattcagattcatctcgaatattgtttcttctttgaggtttttcccactgcacccaagatactggcctgacactttccttatctctattacagaatttaacttgttcattcattaacagatatttattgcctactatgtgcaagaatctgtgctaaaagctgggaatattgcagtaaacaaaaattaagtttacagcttacatataatgtggtaattatccatcttttaccttcattagactgagttcatgtaggactttatgtaatatctttatatcttcaataccagaaatgcctagaaataatttgcataatatacattttctttaaagatttaacaaaagtctgagggacagttttcagaataaactgaattaaactctctctctcttatgtgtgttatgtaaacatatatataaaatacacttttgggttttttgcttaggaagtagaaaaatgctaaaatttctgttacttacaagcagattaaaatgtccaagaaagaaaagtagggatttatattgattctgctcaaatgcttacctagacaatgtcaatatttatattttactcccctgttgtagtagaatggtaattggttctctagttaagcagcttttttaggattaattttgaagcaagaaattcagattaattaagggacaatttcacttgcagcatttaggcattattttaaccatcaaacttgaagtggcaagaaacggagttgcttaaggaggccagacgtaacattctaaaggtagtagggtcttgattgggttgcttaggcattaaaaggctgtttaacttgtcttgaagtctatctttccttgatgtcttctgcggtaagaacactgtgatacagatggaatgacgggaagtggttttcctttctttcagttggtgagtttgtaagtgatgcccttctcgttcctgacaagtgcaaattcttacaccaggagaggatggatgtttgcgaaactcatcttcactggcacaccgtcgccaaagaggtaccagcccataaattctttcttattgcaaagtgaagatttcctggggacgtgcttaatggcattttaggggtattttgaggcaacagctatgttgataagttatttaagaaaaaaacccagtgctactatccgtaacccagattttagtttttagagtgattttaggttcacagcaaaatcgaacagaaaatagagttcccgtgtaccccctgtccccacacatgcgcagcctccccatccatgaatatttttaaaaagtcaaaaatagggccagttgaactagattcattatgtgcctgtgccgtgtttcgcaacttaaaaatataagttgtctgtgccatgccttataacttaaaaatataatctctaatagttataactttaaagtttacccttcagattatttttatgcacctgttgttttcttttgtcatatacaattttttaataatttagccttttcccctgttatctattagtgaatacagtggtagaacagtgaagtagcttttttataccagcctgaaagctccagttagaattcagtttctcagttataccatccagttttatattcagcaggccatgcctaccatcttgatttttccacagggtgagtctgaccgagcacttggttaacctctgcttttggctaagccaataaaagatgtaagatacttagcatgaaaaggtcactgtgtggtaagaccaccttcacagctgctgtgtccccttgataggtttcctaataaatttatataggtttatttgtggcaagatcagtcttaggctaactagaattaggctcctttatctagctcatagtgcttcacttgagtcaattttgatcccctgtccctcaccggaacatgtctggagacattttttgttattacagcttgagggagtggtgttactggcatctgatagtgcccagaggccagagattctgctaaacatcctacagtcaacaggataaccacccgccacccccaagaattaggcagtccaaaacatcaatagtgctggggttgagaaatctgatctagcttagcttaaccattgtatcatagctttatagctgttagacagaaaataccactgaagatttagtattattttatgcctcttataaaatagtatatttggatccactgtagaataaaatgttttttatgtaaaaatgtgttttggaggtttaagagcttgctgagtttaagaaaacaaaccaaataatttgaagtccagctacctatttgataacctcattttttattccttctgtgttttcaaaagaaaaatcctttgtctctaagaaacggaaatgactcccataaggtcaaaatacagtctgtaatattttcattgtctacctttatgtcttgaattattcatccttcatttatcactagtggatgctctcagaactttatgctaatctagatttgtgcaaatttagcaaatcccagaaaagcaaaaagacattcaaggagaaatctctaatgactgtaagttctgattcttagtggctgcaggggataatttcttctcttcccaggattgttactctgaaagtgaaccaagagagtcagaatttctaggataaggcaggtccatgtgagataaacttccatctgtaagggaggtaggagtgagctggggatctacctggaatgcgcacaatttctggatacacgaattaagccagaaggcattaattctctggtatctgttcaccagtggagactgctacatcttatttcccaattagtttccattccagttgttcgtataaacctctattatataacatcgtggtcttattaaataaataataaacaagaataaaaagagtaccaaagtgtaacccatgctaaaaaaaatcctgttgtaaattcactcaaaaagcaaataatcttttcctttgtgaaattggttcctaatatattgggtctgcatgttgattattttatgtggagttttcttacaatgaaacacatctactctaccactcactgttttctccttacactttgtagacatgcagtgagaagagtaccaacttgcatgactacggcatgttgctgccctgcggaattgacaagttccgaggggtagagtttgtgtgttgcccactggctgaagaaagtgacaatgtggattctgctgatgcggaggaggatgactcggatgtctggtggggcggagcagacacagactatgcagatgggaggtaaggtggcctttgtgttcagcctcagagatgctgaaacatcttgtatggagtatttgtatcctgtaaattaatctttctgtttatcactgaaaaggtctctgcccactcccatcagagtctgctgttatgcaaaaatctgaactatgaatttttatggcatcctgttgaattaataatatcagtcacccatcacagagttaattttaactatttaatattaaacttgggatcaaaatcccactgataactatcataggttactggtagttctaacagggagttgaaataataatggcgttctgttttggtcattaatttaaaaatatttttaaatgctctctgggattgtcagtcattagtttaaggtgaattttcgttaaaggtttggtttgagattttgggcgttctctgtgtggatgtgtaagggtttttttttggccttttatcatttcttttccttcatagtggaagtcaaaggcattaataaatgcttgttaattttttttaactacctttgatttgttgattgtaaagaaacctattttcgcctctttttcttagggagcttagtcccgttacttcttacctgattctcattcttaactgaaggcaaacatctatattcaaatcataaaattataaaatgagaatctttgggttggaaatgccatctggttcaggcattgattttatgctgtctcatcccccgaagggtgatgattgtatcacttatcttattccttcagtattctcttagatgttccctagagctacagatttccaaacagcacattcaataggagttgtaagtttataatcggcaaactacaggatgcttgtttttttttcttttaatttctggtgtaatctgctactagggcccccatagagtttattgtctatatcagctagaacactgggaccacagtcataaactgaaggatccaggcaaactgggtcatatggttacccccaccaattacagtcttcagtgatgatgtcactatccaggttgatattcagttgaaatgctagccagctccttcctagttaccttcatttacatcccatttcagtacctgaacacagtcatgctttagactctgaaattccttagaaatagtaccataaggtttatagctttgatattcctctctgatcatgatcttccctcataatcacctccccagttcaggcttttagtccattatcctctttttccctgcctgcctttctaatcaggatggaatcaatggataaccattcttacctattccattgaacatccttgacttggctgaaacccttcacattttctaaacatatttttgtcaattctccatagctaggaaaaattaatttctttctttagttgcttctgggatttctaaagtatcaagtcatgtaaccttaccacttaattccatttcttattcatgctgtaacatcagctgggatcttaatgttactagatgcacctaattatctctgtcttgatgacctatcatcttccccatagcagttgatccagcccaacttcattctccttggttcccagcgtaactctctctcatgctctacagatgacccctccaccgtcatccattgtgaatttctgcaacatggtacctgacatttggtaggtgcccagtacgtgtttgttgaataaaccattgaattttctcctgtacttcagcaactcttgtaccttcttctatccctttgtttcctgtcttcccttttatgattatgttctgctggactctcaatcatctcctctccctttcttgcattttcagtctccctctcccccacacccccaggcttcatccaccctcctcccagataattctttcccatgtgttactatctttctactatgtgtttttaatcctgttgacagttggtaggaaatatttgatggtttattctacctgtagaaaagtccaaattctcttgcagggcattcagaagtctcttacatggcttcagcctgcattttcagccttatacatgtatgtgactctcctggcatcctaaaaccattgaccttttctttctctaggctttcattcccaccgttctgccccatctgaaatatttttcctttttttgtcaaatggggttaatgtatgataaagatatttgtcaactctaaagtgccacttcttatgacccgtcaaaatctatatatttataaatgttcacctgaaaagatgcagcctttacaagtctttacaggtgccttgctctgctatactacccttgctttacctttttcttataagaccataacttatcttccaattaattgtagtcatatctctttttatctgttagaatccaaactatagtttatgtgtctggtatgtcttgcacataggtcctcaataaatattagacaaagtaaattgtatattttaaattttttttcatagcttttggtaaggacttcatggtccacgattggatattgtagaaagcttatccagcccactgcccaggacgactttgaatgcggaccaacacaaattcataaactttcttaaaacattatgaaatttttttgcctttttttttctataggccctgttatagagcctcccatcttttagcaaagaactgtctaatacaaatgtaatgtgagccacatactttttcgttttctttttttaagatggagtctcgctctgtcacccaggctggagtgcagtggcgtgatctcggctcactgcaacctccacctcccgggttcaagcgattctcctgcctcagcctcctaagtagctgggattacagacatgtgccagcatgcccagctaatttttttttttttgtacttttagtagaggtggggtttcaccatgttggccgggctgatctcgaactcctgacctcgtcatccaccaacctcagcctcccaaagtgctgggattacaggcttgagccaccgtgcctggccttactttttcattttctaatagacagtttaaaaatagtaaaaagaaacaggtgaatttaattttaacaacattttatttaatccagtatatctgaaatatcatgtgaccaatatgaaaaatttaataagatagttcacattctttttttatgtttctttctttcgtaagaagtcttaacacttcttttaacatttaacagcacgtctcaattcatactagccacacactgtgtttgatagttacatgtggctggtgactactatatttggacagtgtagttcctggatgacttgaaatttcttatcactctttatttttccattaagacagacggtttgtataacctagtaatgttttctaaggctgagccactgaatttttattattgtttttaactattcttgtttttaaaatttaaaaaaattggtttggattcagtataattagtatatcaggtcacttgcaccattttattttttaacttcttttcctgtagccctgcaggcgggcagggcttctttcatgtggacaaaaccagaaaggtgttgcatcactgatccacacacaaggtgggctcctgccaactggcagcctccttgttccaggaaccagccctccttttgacacttgaaatgtaaaatcagaatagaagtttaacgtacctgacttaaaacatcttcaggggatgctacgtgacaattcttgaagaaggagaaacgagctaccattttcctggaaacaatatttgattcacagtattttgttgtttggtagttaatgaggcttgttttgatagaagatgagtgtttttctatcgctaatggggcatttagagaaacattccttgtaggatgagctctgttttatgacctcattgaaaaagaggtatgaaaaagaggtaaatctttaacataggcaaaacaggtagtgtttcagaaatttatgtgtaaattaccgagtatatttttctccagtgttgtaatggtcatattctcagatcacctcaaaatacctatttatgcagtctgtaatgtagcataatccagactgttactaacattatgtagcataatgttaataataataattacgtacataatgttaataatacacagactccagccatcgtgggtaagatttttttccatgggaaaattcatttggaaagctaacttgtaagactagccaggtaggcagcctagccctggaggcagagctgctcctcacctggaactgcagaatctgattgaacccagtggtccatgggggttgctgaattcgtaaagcaaatgaaatgttagaagaccctctaattgttgtagagtcacacttttcctcttgcagaggaggtactcacattttttttaagaaacaatctttaattatcgatgtattcttttaggtttaggtttgcagacactggtgagcgtgtgctgagaggtaacttgatgtatctttctggataattagatgattttttttttctatttctttgaacattttttttttaaagagctgcttaagatctggaggagtgattccttttgaccgtgtcttattttcattaagactgtataacttggaagagtttttttttttctttttctttttcttttttttttaagatgaagtttttgctcttgttgcccaggctggagtacagtggtgtgatcttggctcactgcaacctctgcctcctgggttcaaacgattctcctgactcagcttcccgagtaattgggattacaggtgttcaccaccacacccagctaatttttgtatttttagtagagacagggtttcaccatgttggccaggttagttaatgttactctctggtttggggggcagtgatatgttttggcttttttcccacccagatctcttcttgaattcccatgtgttgtggaagggactcggtgggaggcaattgaatcatgggggcaagtctttcccatgctgttcctgtgaagtgaataagtctcacgagatctgatggttttaaaaagaggggttcccctgcacaagttctctctctttgcctgctgccatacatgtaagacatgacttgctcctccttgccttccaccgtgattgtgaggcttccccagccatgtggaactgtaagtccagttaaacctctttcttctgtaaattacccagtctcaggtatgcctttatcggcaacatgcaaatgaactaatacagctcggggtggcttgtgtgggtgcgtatggccatgtatgcaggtgtgcgtgcattggaatatacaattccgtattgaacccagtttaaacttcatcagttctggtgattgctggagtgtcacatatggcaagacgtcaccttgccctctaactacaccagaaaaccaggccagcaccattgactatctagatacagtgggccgtttatattattattgtttcatatttttagattatttggtaaacaatttacagaactaagaataaaggaatagtgagaaataactattagcaattttaataagagttaacatagtaaatattttaattttacgaagaatttaaatatggtaaacccacatgtttattctgtattttcccagttttgaaggtatggatttctgaaatgagcattatcctttggaatgcagctagctgctaatcacctgccatgcacgaacctgaaatatatccgtcttacaaatactggttctacatttcaaatacatctctattaggttcatcatatttcttggtcttttttttttatacttgcaatttcatttaattattgtaaaaatttaagatatttaaaacattgacagctcataattttattgaagagagaatatagccatcttccctcaggaataaaatgttttcaagtttggatttgtaaacagctattaaaatgatcaagccagtctttttttccccctttttttctgcattatctcttctaatcaccttagagagattcctgccttgggcatttgtccacttcctaatggtatcaaataaatgtgttgcacagacataaaatgtgttgcataagcatcataaaatggcaaggaatactgtcacatcattttagcaatgatggttaatgtttttgtcacataatattgagtgatgatatccttcctgttgaatgactaagtggatgagaataccatatttcctttttattcttagaaatacattgctcagccgggcgcagtagctcacgcctgtaatcccagcactttgggaggccgaggtgggccgatcgcctgaggttgggagttcgagaccagcctgaccaacatggagaaagcccatccctactaaaaatacaaaattagctaggcgtggtggcgcatgcctgtaatcccagctactcgggaggctgaggcaggagaatcaattgaaccagggaggcagaggttgcagtgagccaagattgcaccatcacactccagcctgggcaataagagcgaaactccacctcaaaaaagaaagaaagaaagaaagaaatacattgctcacttgtcaattcttgagcttgagaaaattcatctaggatatcatgtgaaggctcatagcctaaggttttacttacgtgatcaatttcattcttcttctggtttatctaattggtaaaatgcctccttctgtcagttgttcctatttgccaatatgtggaagatgatttttgactatattcagtgagtctccagacttctttttatcatgctttttaaagagatgggacctcactctgttgcccagacttgagcgcagtggctattcactggtgtgagtatggtgcattacagctgcaaactcctgggctcaagtgatcctcatgcctcaacatcccaagtagctgggactatgcagactttttttaaaccatcttgaaagatgatgcagtactttgggaacacagcaataaaaatgtgataatttccctattgcatcacctttctaggcaattatatcattctttcatgctcatattattttgtcttctttagcacagtttttaaatagttgatggctaatgatgaaataattcttcggatgataaatattttgtaacataggaacacaatataggaaaaagatcgaggttcataccatatctcagactcatggttaagtacaagctagaatgagttttagtcgattaaatttctttttctctatgaatggataaagtgagaatatcagcccacaagtagttagaagtgctcagaactcaaaggtaaaattgtgtccaagacctgatggtattctaaaggttaacagcctatcctacttaccaagaatttacatttattatgaggcctgtacaacctgatgcaggaaaatacttggcataattttctataagttaggtagttaggtgctcaacaagtatttgagttgaatcacattggcattcacatcaaacacatacacctacgtcatcatgttaacttaaggttaatagtgtcaccaaaactaactggtctttaaaaaagaaaaactaggccaggcatggtggctcatgcctgtaatcccagcactttgggaggccgaggctggcagatctcttgatgtcaggagttcaagaccagcctggccaacatggaaaaaccccctctctactaaaaatacaaaatagccaggcatggtggcatgtgcctgtaatcccagctactggggagactgccagagaatcgcttgaacccaggaggtggaggttgcagtgagctgagatcgcaccactgcacttcagcctgggcaacagagcaagactctgtctcaaaaaaaaaagaaaagaaaagaaaagaaaaactaaggaatatcattctagacatgcagtaattaagtaaaattgcatcaggagtctaataacatagcatgatgggtcccatgtttcattatttccatgggcagaagagggatggctacattataaataaaggaaaattgtaagaataagaaaagatgaagtatgaaatatttccaactcaaaaacaaactgtatctgagcatgcagaggtacaaaatgtcacctttttcctccagtgtaatgaagggcactaaacctcttgagcatttgatatgttccagatactatattaaagtgatttttttttttaggagacaggttcttgctgtcacacatgctggagtgcagtattgcaaccatagatcagtgtaaccttgaactcctgggctcaagtgatcctcctgcctcagcctcccaaatggctaagactacaaacacattgccaccatgcctgcctaatttattttgatttatttattttttttgtagagacaggggtctcactatgttgcccagactgttttcaaactcctggcctcaagtgatcctcctgcctgggcctcccaaagtgttgagattacaggcatgagccaccacgccagaccaaggggtgaaatcttgataacaataatcaatgcagtcatcataaaacgcttgcacaggctcaatttgtaggtggcacagtgctacatctagtcaaaagcaaatttaattatggtcattgtgctctgagaacttttctcagaaaataataaccagatggtattatagatggtgcatttcacaaatacatgatttgtagttagtgaaaacttgtcattcaatcatgtaataaattatgcacatgccgtcttccacttagctagtgatgttgaaacattcatagccttacctgatgagctcaggctgtcatgagaatttatgtctattcagtactttgtctttaaaattaggtgagagagaaagagaggctgtatttgactatatatctttttatttgtatctctggagttacaagtttttgaatatataatctttcagctgcctttctgcattgcattttgagaaatgatattaaatgctcaaggaaaaaaaacctaacaactttagagggccgcaaagtgaatcatacaaaagataaattaaagctttaaatctttgccagtggatgagtcaagtaagagtggatttaatgaaatggctcatggctttgagaagcagctgtcataatgctgggttggcagcttccaggactgtgtgaggctttctgactgtctatactgaaataggagaactcatttgaaaatgacgaataggagaatagcagaaacttgcattttcttttgagggaactggctgccagttttgaggtccttatttagaaatgctcgattcctgtattgaataaacttggactacatgtatgtcaaaaagaaaagcaaaacacttttatagccttaagcagattacagatgtgtggccaaaccagtggggtctgtttttgtttccaagcaggtgatggctggaagaggagatgcctctgtagtgcagggcttgagttgctgctgtctgagctacatctggcaatgagactgtgctgcttactgagacctaatggcacaggttgccccagtaacaggatattgctgaatgagaaatactgtaggattcatttgtaagagttatttggagggttggattattcagtgctaaggatcctaagctactgatgcatggactcttttcttccctccagtatcttttaattaaactgtacaaattccctggcttaaaaatagtaggaaaagaggaagaaaatacagattcttatgattttaactggtctctggcaatagtacaccgaaacattaatttcttgttgaaaccatctggatatttgtatcttcagtgtaaaacccctaatttagataggactctccattgtgacatggaaaaataaccctttaattagttaattaattttactgtggcctcaaaatctacatattagcatatcaagccaaaaactgttggctttacttgggagccatgtggcttaaactagtaccagtaacttaccacaaggaactcagcaaaattataagtccatgtttgttttggaaggaaggcaattattacgaaaataatttagagatgttcaaactatttcctttgagtagaggtagagagtgaacaaaatctgtcccaagtgggagctaactagcttccttttttgccctccctgtttacaaagtaacacttttagtttactaggtaacatttgcagtatccccagtgtttcaatgtaaaattgtaggtggtagactaatgccacttagccaaagccatgatcacctgaatttttaatatatatttttgtatggagtgagatactgggagaacagtcttcattagcttaaactctagaatgtactgtttgtttgtttgtttgtttgtttgttttgagatagagtctcgctctgtcacccaggctgcagtgcaatggtgcaatctcagctcactgcaacctcccctcccaagttcaagtggtactcctgcctcagtctcccgaggattacaggtgcctgcttccacactcagctttttttttttttttttaatggagacggagtctcactctgttgcccaggctggagtgcagtggtgtgatttgggctcactgcaacctctgcctcccaggttcaagcgattctcctgccttagcctcccgagtcgctgggattacaggtgccaaccaccatgcctggctaatttttgtatttttagtagagacgaggtttcaccatgttggtcaggctggtctcgaattcctgacctcaagtgatccactggcctcggcctcccaaagtgctgggattacaggcataagctaccatgcccagccaagaatgtacaatatttttaaagaaatgcggtttattaccataaaatacaggttgagcatccctaatccaaaatctgaaatgccctaaaatccaaaatgttttgagcactgacatgacagcaaacgtagaaaattatgtgactttatgtgttcaatgtatacaaacttcctttctgaaacaaaaattatttaaaatgttgtataaaattgccttcaggctgtgtgtataaggtatttttgaaacataaatgaattttatgtttatacttgggtcccatctccaacatatcttatatgtatggaaatatcccaaaatttgaaaaaaatctgaaatctgaaacacttctggtcccaggcagtttggataaggattactcaatctgtaaatacagtagctcaaattgattttgtaaggcagtcaagttattatttatagtattttaatttgtattattcttttaatatagcaattcattttatatatttatataaataaattttttgcaattgagcaaattaaaaaaattaagtgcttccttcagatctacattttattttctatttgttatcaatttaataagtaaaggacacacagatcatctgattgtgttgtcagacatttgaaggtgcaactgatgaatgttcactgttgtactttgttttgtcatgtaaattgttttaaagagaagtgaatgttgagcatatagtaggccacacgtgcctgtggattggctcattgttttaggaatgtgtaattctggaaaagatttgccaagggtattcaaaagtatagtttgatattagaaattatttgaaaataatctttatagcatagcaccattttatttagatcaatagtaattcaagcagtatacataatttgctattgtaagcgtagcatataacctaagttttcttttacatttgagaccactgtttgctgttggtcgaatttggtcttccaagattttttgcttagtgacctaattgccagcctttgtgaagagctgttacttattgtcaaaccaggcagtaagggtttgcttttatctttttatcagttctttcaatgctagtagtcatgagattaatgtagttggatactaaaatgttaatacgtgttagataacaaactgggaaagagatgaatgacatcatgaaggaaagggcagtattgcacttacagtgatttcatgatgatagaactaacctgcctaaaaagacattgggtggaaacagaaaccaggtgtaatagacgcatccaagtagtcaaggaaagaaaagacttgtaagtaaataagataatctttgcttcaaaaatatcttcaaaggtttaaaatgtgctttaccctcatatataatctttttgagcctatttctttacctcaaacatggggaaaattgcaataatctgtatcacggtatttgcttccaaaacgactaattggtgtaaatgcatatcaagccggtaaagtttacagtggacttgtttaaaatgcgtagattggaattgttgggggagcaggccagcagcatgggatgttttttttgtttgtttgtttgtttaagactctgtcgcccagactggagtgcagtggcacaatctcggctcactgcaacctccgtctcctgagttcaagcaattctcctacctcagcctcccaagtagctgggattacgggtgcctgccaccacgcccagctagtttttacatttttagtagagacagggtatcaccacgttggccagactggtctcgaactcctgacctcaggtgatccgcctgcctcgggctcccaaagtgctgggattacaggcgtgagacaccgcgccagctggggtgatttttttcttagtcaaatcacttctctacccatcatctcacactgtcgaatacaaagactctccttggggctcaatgactcatctcccacctctggtttgataatcatggctattataacatgttccctttttaattagttattttaaaattattgtaggtcttgtaatcataatcaataataatacgtaatggctccttaagcacttctatcctagataaggttgagaacattattaaaattagttttggtagtaatcaagtaatgataattcttatttatgaatttaaatatgtaggagtttttttattttagggaagcaaaaaggactagaaagtatgatgtctcatgattagaaaactgctataaaaatgaaggtagaattgatttgggctgttttggacattttaaatagaaatttaaataggtattcaaatagcaaagtcattctactttaaaacttctatacttttttaggatcttcaattttatatttaaattatatttttgaaatggttttagaagaaatattgtatcttaaactctaactactaataagtaagagaagatatatcaaaggtttgatcttttatctcctagaatatactattcattcgtttcccattgtacgtcatttgaatgttaatggttagcctcaaatggttttcaacataattgtatagctactattattggaaaattggagccaaggactcatacacatatcagaagtggtaatgaagcactttggttttatgaaaatatgtttacaaggtagtcacaggatagcaatattgcatttactgtaatacaatgatggtggaactaagtgcagtggaacaggatgctgagaccacagttaccgcatctctaagtgcctcgtctagttatggtccaacctcagatataactcattggtgttgaaacacacctagcaacattttaagcatagaccgttcattaaaaggtacctttttaaaaatttttatttttaaaaattgacatgtaataattgtacacatttacagggtacacagtgatcagatcagactgatcagcatattcatctcaggcatgtatcatttctttgtgttgggaaaattcaatatcctgcttctagctgtttgagattatgtcatatattactgttaactgtagtcatcctacagtgctgtagagcactagaacttattcctcttatctagctgtaatttggtatcctttaacaaatctttctctatcctcagtttctacctacccttcccagcctccatcatcctctgttctactctttacgtctatgaaatcaacattttctagcttctgcatatgagagcatgtggtgtttaactttctgtttttggcttatttcacttaacatatgtcctccagttccatccatgttgcttcaaatgacaggattttattcttttgtatggcttaatagtatttcattatacgtgcatgcacgcacggacacacacacatacacacacacacacacatcacattttcttcatccattagtctctttggacatctaggttattccatatcttggctattgtgagtagtgctgcagtaaatatgggagtgcagatacctcttttaatatactgatttctcttcctttagataaatgcccagtagtgggattgctggatcgtatggtagctctatttttagttttttgaggaatctccatactatcctcaaatggttgtactagaacagagcttttttaccttccttccatttgggaatcttcttacccaacatgtatattagtaacttggctatgtatgttccattctctgtctcaaatactgtgtctaggacatctgcaatctttggctatgaccacgactgtaaagtgcatgacgcttttgctctgtcatcagtattagttgacaggcaagtaagatagtacttctcttcataacccctttacctgcccagcagaataccagtacagacagacccagaatatctctgggctcaagaatccagacatttataggatgggacttttatctataaatcaccttaagattagtaagttcttagaattggttacctttgccatttctcagaagccctttgtctagtaacctgtgtgtcactgtcatttccagcctgtctttcctacacattgtttatgcaggctttaggagtgcccaccccccagttctaccccccacccccaccctagcctttgtggttttaattatcctgtcttggctgattttgttttgttttgacatttcatccattaaattcctgacactggctatctctttacaattattatactatttttctttctggctcgctcttcctgattgctgtaatccatgcccttgactttaaataccatttgtaagtagactaggccaaggtttatttctctaggccagactctacctagttatttcataggcatatgaatcctaacatgtccaaatgagagttcttaattcccctgctacccagtcctcaatgtggttctctcaaagctattctatctcagtaatggtcctatgccctctcctagggattattgctgagaacctagaactcatcatcgtctcttctgcacatcctatgaattctggatttatccacttatctccatcttttccagcactaatctaaactcccattgtttcttgctggagttatttccgtatcctgctaatctctgctctcgttctctctccctgacacatgcgctgctttcttctcccacaccaagccattctctgtacagcagccaggatgtagagtgtttatttacataaagcagatcctggaacccccaaatttaagttgtgttcgtggcttaccaatacgcttaaaaaccaagtgcacagagagaaaacaatgaagccttatttggatatgctgaggataattgataacgggtaacaactaacaaacacgtagttggtgtcaggtttgacctcctacattccttacaggtattagtgtatttgacccagctcctccctacctccgcagtatcaccccatgcctctctttcccccgactctcccctgctcagtgtcacacaagtcaatatccccagcttgctaacccccgggctgacagatctcattgtctataatggatgttccaaggtcccaccttcagcctcagttttgttgccatctttccagaatgaattcccttgatcattctgttttttggagacaaggtcctgctctgtcacctaggctggagtgcagtggcatgatcatggctcactgtagccttgacctccctggctctggagatcctcctgagtagctgggactacaggctgcacctggctaatttttttttaatttttagtggagacaagatctcactttgttgcccaggcttgtctcaaactcctgaactcaagcagtcctcccacctccgtctcccagagtgctagaattacaggcatgagccaccatgcctggccctgatcattcttttctgaagaaaacaccccttcttcattattctcaatcctagcagcctatttacttccattctgaaatgaatcacattttagtattttattggttcgttgtcgttctctccccccatagaatgtaatctctctgagtacagggagcttatctttttcccttttggagcctcggatccagcagaatgccagacacttagcagccactagcatttgatgagtgaatggcttttcatacacaattttagacattgttcctgattggtctctctagtcaataatagatttatcaaatctaatcgataatagatttctttttcttttctttttttctttttctttttctttttttttttgagaagtcttgctctgtcgcccaggctggagtgcagtggcatgatcttggctcactgcaggctctgcctcccaggttcacgccattctcctgcctcagcctcccaagtaactgggactataggcgcccgccaccatgcccagctattttttgtgttttagtagagatggggtttcactgtgttagccaggatggtctcgatctcctgtcctcaagatccgcccgcctcagcctcccagagtgctgggattacaggcctgagccaccgtgcctggccgatagtagatttcttttattgattagagagactaatcagcaacaatgttttaaaattctcacatagatctctgaatgggaaagcagtcttgaattatgcttgcagggagagagaggggaaggaaggaggaggaatggtataattagacttcataaggctagattttgtttctacttaaataatggtatcacagtgggacatattatccatgcagaaagtgagtgggcatctggtctattatctgtggtctttcaggaatggcagctctttagtttaaaaaacaacaaagtgcagcactgtttatttaatggaaatagaaaagcagtgcctgtgtattagtggctcagatttttttgttctttgttttcagctgtctgctgtatgcctctccagcggggtcttacagaatctcaagtctaccatgatcaaagctgaacccattagctccatttcttaattcctcctgtatcctctgttaccattagtaactattctccaactcaaagcatcagattcctcctcttactcactcccttcatccccagtcaccagttctgtgctgttattttatccaagttctcagtaggcttcacgagcaccgccttcacatcccaactgtcgctcctccacctatctgtcctccatgcttctgctagctcatgtttgttgcaatacaactaaccttgccactcttctgcttcaggcttttctactaggctctgcatctagatgatggtccagactcctcagcctgtgaaacaaagcccttcataaaagagcagagctacagctagtcagctcccttcctgcagtccaccccctcctccaccatactgagaattggcaattcctgtagcactctttgtatgagtccattttcacactgctataaagatataaccaagactgggtagtttataaaggaaagaggtttaattgactcacagttctgcatggctgaggaggcctcaggaaacttacaatcatggcagaaggggaagcaaacacatccttcttcataaggcggcaggaaagagaagagcgaggagcagagtgggaacagccccttataaaactgtcagatctcctgagaactccctcactgtcacgagaacagcatggggaaaccactcccatgatccaattccgtcccaccaggtctttctctagacacatggggattatgaggattacaattcaagatgagatttgagtgaggacacagccaaaccatatcactcttcatctgctacgggtgccattccctgtttctacagtgtcctgtttgctaccttctttgtagatttctattcattcatcatgtcccagtttacctgttacctcttcaacagattattcttcagtctgtccctcccaaactccaccaatgaacattctttgttcagcccattattgttaatatgcacttcactgaaaacactgttttatgcttgtttacatcccatctctgcagggctctgagcctatagtcagcagttgggaacttactaggcatagcgcccagtaaaggatagctctttatatatatatatatattttttttttttctaaaataataagccccaagaaaaacattacctgtgaaaaacaaatgatatttttataccattttcaaaacctaatagcaataaaaagaaaagaaatgtcataagtatacatttaagctgtagttaaaaacagtaaataggcacagtatttaactcttatcatgtgctgttccaagtgtgttatttacatcattggctgttcacaccatcccctgaggtggttaatatttccatcccatgttaaagatgaggaaaccaagtcacagcagcctaagtgacatgttcatagtcacattggagctggcaggtggcagcactgagaatgaaacccacgtggctgagctctggaaagtcaccattaatcaccacactagaccttctctctaggatctacataactagaacatacaattaactggagtatatgtaagtgtagtcgttccttgagaaaggaaaagaattcacaaatttcatagcctcatcccttgtgcatttgtggcattgtgctaggggtgtctatttgatatttgaccctacagatttctcagatgccaaccaaccacagatactttaaaaaaagatacttaatacttaccaatgcaagaaagtgggcttgttggaagaggaaaaatgttagctcactaatggaaaatcaactaaaagtcttacctctccagaacatgcttttcctaaatgttgtggctaacccaagaagctacatcatctttacctttatgatacaatttaaagtacttttctacttacttcaagccctcagagcacagaggcaagggaggccttgggctataaaccctgtagcctgagccacatggcttcttctcctggacagatacctggcatattctgccactgaggatcagtggtgcagatgtatctgttttctcctaggaatggggctccacttacgaatctggggcaggacaaggtattgctgcattttggggagcgtgctggaaggaggagcagagtttgttgtttttgcttcctgatatggactggctgtgtctccattcaaatatcaacttcaattatatctcccagaattcccacatgttgtggagggacccaggggaggtaattgattcatgggggctgatcttctctgtactattcttgcgataatgaataagtctcacaagatctcatgggtttatcaggggtttctgcttttgcttcttcctcatttttctcttgccttttcctcatttttctcttgccgccaccatgtaagaaatgcctttcacctcccgccatgattctgaggcctccccagccatgtggaactgtaagtcccattaaacctctttttctccccaatcttgggtatgtctttatcagcagcatgaaaacagactgatacacttccttaacagaaccaattattttttcccaaaaaagagggggagaagcccagaagcatgcagcttctctcttctttctaaggaataggtcttcacaaagtgcccccaaaagaaaaggaccaggcttttctcttactttgtgactttcctaggttgctttgtagccattttggacacagaccacctatagctgtgtagtagttctcatgtgtatggacacagtggaaggagatgccaggcacatagttcttgctgcattgacaccttttcagggcatcttcttttaccatcttctgtagaaactgcaacagcccggccaactaccagccccagcccacccctagctttgctgctttcattttctctgtaacacttgtcaccttgtaatgtgctagtgtaacatcgttgttttagttttcttatatctttccttccctgtagaatgtaaataccaggaaggcagggaattttgtctgctttattctctgcagcatccctagactccagagcagaccctggaactcaaatatttgttagacagccaaaggtcatatacttccaactctccacccaaaatatatatggatcacccatccttagtagcagctaaacctttggacatgaggaatttgctcgttcacagttttctggcctagcatctgattaaccaaactttttcacatatcaagaatttaaaatgactccaaaactttttatgaccttaggtgcttctccttaattctagttggttcataaagctgtcagaacaataatctgcttttgataatatatgacttttcttgcctccaagatagcctttaaaaaagcaatttagccttttactgtaattatattccaaatttaagtcttgccagaatatcattttccccctttaaacatactttttatgatgccaagatattttaaagaaaagttcagataggaagcatatttaagatgtcagtatatgtctctaaaatctaagaacatttttctacagagtccagatgataccatctcacccacaaaattaacataaatttttagtaccattggataccatgtccatattcagattctccctgagttccagaaaggtccttcacaggttatgcatttcacatcctatccggcaccagggccagcatcttacatccttaattcttaggattcagaatagcactttttatatcctgacactgacttgctgaagaagctgtaccagttttcctataaactgtccactccttggatttgtcttatatcatgtcccaggggtattgtttagattgttgctctattgctaggatattcatgttaccctaagtgtgtactgagatagcagagtaaagagagattgtcttttaaaggttctgcccaggaactgctggtttacacaaaagctgggctttagtgcttctcggatctctttgcttgtttcagtaatttttttttagaaattcactaattcactaacgtaagtggggcagggtttacaggagcatgtgttgagagaagttggtttgactttaaatggtcatttttacaatccgtatttaggccttacaggtcgcatacaatctctgtcacatattgctgtcatttttaccccctttcttttctttttataatcctttaaaaaatgcaaagcccacccttagctcacaggatgtacaagaacaagttgcgggttgcagtttgccaagacctgctctgtgccactgctgacttgccattcttggagcccactttctgttcttgtcagccaattccctttcaggtgctcaggtttccctccctcctgtcaccgggcctttgcacatgctctacccaccctgcctagtggagagctatctttggcccctggacttcattcacttcggaccttctttgggtcacatttcagtcatgcctcactagacacctggaatctctgcctcactagacacactagcactcactcttttgggtcttctggctgtatgtaattgttatcagggcagtaattttgcatttatacaggtgctgaggtcagtgtctggcctttggctacttgccttgtgagccacctttgctttccagtgtacccctagctcctggcccagtgtccagcttcccagcatccattcatgttttccctggagaccattctgtgcccagcagccagagacatcattgcaacttaaatctcattgagtcgttccagttgctgtaagaaatgtaaccgtactgggtaacactatgcctgtctgtctccaccaccagatcttatacttcctccctcatctgctactccctaagctcactggccctttgttgtttttgctgaacgtgctaatctcttcctcacacctgggcctttgcacttgctcttacccctgcctcagccatccatgcactctcttggttttgccgtgcccgacttcagcatttttagttcacatggctcttccgtggggcccttccctgaccaccctgtttgaaatgctacccatccctggcacacatctatcatagtcattcattagcaattagccccatctcctttccctatagtacttttccataattttttttcttgctcatattacacctccccaactaatagatagattccaagaaattgagtgctttatcttcactacctggaatagtactggcacttggtaaagcacagcgaatattgttgattgaattactaggggttggcttagagaggtacttaatggaatgattcaatggatgaatgaatgaatgcattgccacttttttgctcattatcatcaatttgtacatatgcctttcaactcaaatatttatccattggctaaagaaaaaaaatacctgaatccccgtgtctctgcagtttacccttcctcactgttaaaactcagtgcctgtgtaaaatttcattatattttatttacttcttattccacttgtgcattatgtggatattcctgcctcatccccacagccacctatcacttccggccaactcagatgcctctggctcgcaacaatcacttctctgttgaatttctgaagcgtttaatctgcagtatgtctgttactcatacagcagttagtgtgaattgtctcactcagaataagtattcattaaatgtgtaagaatgatgatatagcctaatttcagatcaagattgtgatttatagctcattcttaatcagctgtgtcatgactttatttatttattccttttttttttttttttgagacagagtctcactctgtcacccaggctggagtgcaatgcagcttctgcctcctgagttcaagtgattctcatgcctcagcctcccaagtagctgggattacaggcgtgcacccccacgtccagctaattttttgtatttttagtagagacggaatttcactatgttggccaggctggtctcgaactcctggccccaagtgatctgcctgcctcggccccgcaacgtgctgggattacaggcatgagccacctcctcaggcctgagtcatgaatttttggtagtccagtcatgtggttatcttcctaaagctggaggccttaaacctagggccccaggtgggcttatgcctttagctgcaagtaacaagaaacccttttcaacctttttactgatttatttagagagaagtacacataagaggtaatgcaagtaagcaaagttttttaagaccacacaactagatagccagcatccggaccagaacacagagacttgctggcccctagaatcctctctcctggcccctgccagttactggcctttcccctgagttctatttgcctgcagtttgcttgttttcatatttaattcaaatagaattaggtgatgtgtccccttgtgtttcgcttctaacagtgcctttatgcgggagaagtactggctatttcttactttgccctccctccccggaaacattttcctaatttagtagcagtaatttcaaaaactgctttcctttcggacaaactgacttatccagccattgtaccttccagtttagactctggcagtttggagagttgagacagagagaaggagaaccgtctgtttatcttcttgaaaaaaactactgtattttctctctcttctgactctgggagcctctagactcttttttcccattttcatatccacagaggaagagtctgaacctcttcctgctgagctttcccctggttggttgcatttcaggaactgacattggttgtcttccctcttccctcatcagtgcaagtaggttggatctcatgatagtccatattcacataaccatgagaatcagagctttctctctgtcatttcctccctgtttatctgtagcaagaagaaaaaagtccgtcttaacagagactgtgaaagaataaatatagactttattgttttagagcagttttaggttcacagcaaaattaggcagaaggtactgagattctcccatatactccctgttcatacacttgcacagcctctcccattatcagcgtcccccttagagcgatttgttacaatcagtgaacctacactgacaccattattatcacccaaagtccatagtttacattagcattctctcagcattgtttattctgtgagtttggaaaactgtctaatgacatgtacccaccattgtagtgtcatactgagtacttttactatcccccaaatcctctgtgttcctcctgttcgaccctctcttgcctttaacctttccaagccactgatctgttactgtctataattttgccatttctagaatgtcatatggctttcttagaaaatacaaatggtgacttttttggcatgactttaataaacagaaatgaaaattggtgtgtgaatcaaaatctttcactctgtaaagggacttatcaggcggcacctgcatgtggaattatatcaaggtcagctttagttagaaacagaaggagagtcacctttgtgatgtcatttctccttcatccaagtaaaatctcgcatgctgacacataaaattttatcatcagtgatttatttcctcgtaggaatgtccctttgaccttattaaattcagatactctggggatggtcagcattttcagatggttcccttgttctgtaaaaatgtttgttattggtgtttaaaagctgtaaaagccacccactataaattgatagccactaaagtctgcgaatgtggtatgaatgttccactatgttgccaagcgtttattttattgtgagttgttatttgattgtttgtaaggaaattgttttatgatgctcagctttatatttccataaactgttcctcccttgcaactccttaaactgtgatgagcttttcaaaacaagtccacaggacaacagtctgtccagcatttgaagaagtggtggaaaagtcatttttttcctttcagtgtttctagctgttcatgaaaactgcagttaaaagttgtaatgttgttgtgtttggcattctttgggaagatgcagcattattcaaacaaaaccgtgtgctcttgttttaaatagtgtccaaatgaataattgaattcatggacatctaaatttaattccagaaatcaaagctatggtaataagaacttggacctgagttctcttaggccaagtaatttaattccttagccggttgaactatttattacgtgtctccgttcctggttattatgccagtaaattgctcaggcagatgcagggatggatgatgggcatataattcactctttttcacggctagacacataccagaatgcagatcacactaaacagctgtttttacaaacatggtttctattcagagctttaagggccacatccaagtaataacaaagaagcctggagaaggaacctggggatacccagggtcatgttttcaccatcccacctggaaacacggtgctgtccaaaccctggatggtacacttggacatcgtcattccagtcatggttcaagatcacgtgtatacatcatgatttaaagagaatactggtttgatttttcttcctgactttccctgaattttccacttaaattggaaaacagcgctagttagtgcccatgatttgattgaataagtaagagatctcaaacacggtaaattaactgatgacatgcatcaggtcatctttctttgattcaccagtaatacaacagtgagatcctacagaaaaatgcaaaggcagaagctcagggcagctgagcaactgttaaggattcttttgaaatgtagccccacgtagtaaactttcgtgcaataatttgggcagtcaaaaaaaaaagtcagttatttcacctcatttatttctacgaggagataaaggcttccaacatctgattttcagtgccagtgttttctgtttctcttttcacctatttcgtcctagtcttgtggaaatgttacaataactgattaggattttctctgtattaacacttcatttattaacatatgagtaagttgctattaataaattattctgcttaatcagtttctttttattctttagccacatgctaaacttcttcggatgtcttcacttaatatccttacatcatatttaatcagagttagaaaggcgttccacttgggggtcatacacatttttttgaaacttttataaacgccctttatactattcttgtatcctacgtaatcagagtcaggtgttccatggggatcatacacatctttatacaacttgtgtaacacatgctttaaatcctgaggtaatcagagaattcctgccattgatggattaatctctttacatatctttccctttcactctcagcaaaactacttatggcggtcctgttagactttgaaagcctttcaggtttatggaggagtcttcctttctattgtcgtagatcatggaatcatagtgttcgcttgtctcacgtgtttggaatctgatttcctacataatgctgtgctctcactacgagtccaaggcttcctgtggctacaaatcccgggttcctatcacttttcccaatgatgagcttctccttgttggccagaatcagctctgtggtaataattcccttctgctttctccctctcgcttttttttttccttctgggtacattataatgtcagcatagcagcttttaattctattactatggtacttctcgaatagacctgtggtagttgccccagaaaggttgaaaccccctgccacatctaggtctttctcctgtattggttttgtgatctgatcaaggacatctattcctctagtcctgctaggtggtatacgataggcttttactattagatattcaaatgctgtcaaccatgcctgccttgacaggtacatgatttccacaaggatttcctaataggcctttttaattttgttctagacatgcccttcttttgccatccaaatttgcttattttttacaaactatgatgcatcagcatgtaaatgtttaataccataaatatttctgatcctcttcccaatttcactgagttactggttatctcttgccattattctcagcatattgcagtggatctcagaatattttcccctgaccaccagcatcagtattacctgggaatttgaaatgcacattctcaggccccaccaaggcctcatgattcagaaactctggagctgcattagaaactgccacaggcacctggtgatctgtgttggtttttgtttgtttttaaggagacagtgtctttgtctccctggctggaatgcagtgatgcagtcatagctcacagcagcctcgaactcctgggctcaagcaatcctcccgccccagccttctgagtagctggaactacaggtgcacaccaccatgcctggctggtttttgtttgtttttaaggaggcagtgtctttgtctccctagctggaatgcagtgatgcagtcatagctcacagcagcctcgaactcctgggctcaagcaatcctcccgccccagccttctgagtagctggaactacaggtgcacaccaccatgcctggcttttttttttttttttttttaatttttttggagacagggtctcaccgtgtggcccaggctggtctcaaactcctggcctctaggttttttcccacctcagccttccacagtgctgggattacaggcatgagccaccacatttagcaggtaggtgatctgtgtttcaataagccttccaggtgattctgatgctcactgaaatttgagaaccactgaaatatttggttttctacaaaacataagcagttagtaaccatagggtacgcaactaaatagttccagcaggcatccctgaccacagggcattgcagatttacttaagtcagtttcatcttccacctgtgtgagttccagcaggcatccctgaccacagggcattgcaggtttacttaagtcagtttcatcttccacctgtgtgagttccagcaggcatccctgaccacagggcattgcaggtttacttaagtcagtttcatcttccacctgtgtgagttccagcaggcatccctgaccacagggcattgcaggtttacttaagtcagcttcatcttccacctgtgtgtccagtttaagctctcagttgcagtttttaaaccaatttccaccagcatatactgagtatccgctaccgtgcaatgcgttgcggctcttgtatgtgcactatgagaagtaattcccataatacggcaaactcagttttgatatccaccaccccactttttataatggactacatttttcagagcagttttaggtttacaaagaattcaagcagaaactacaaaaagttccctctacctctcacttccccactccccaacagtttcccctggattaacattttgccttagtatggtacgtttgaaccaatatcgatacactattattaaccagtattcctgttttaacatgagaggcgactttttgtgtagtatagtctcttggttttgacaaatgcttaatgctgtgtatctattattacttatgacagtatcgtgcagagtagtttctaaaaatcctctctactccacctattcatcccttccccactccccctgaaccactggcaaccgctgatctttttattgtctccgtaattttcccttttccagaatgtcctgtggttagactcatggcatccccttttagcaactgcagaaactaagaactgtccccaaggataaaaatttttgcagacccactgagctgggatttatacttagacctgctgaattgaagttttgggtgtgtttcttctcaaattgccaaaattccatatggacgacttttcttttccttccctgaaatgtgtttaattgactttttctgttatttgtgtttgccttcacagtgaagacaaagtagtagaagtagcagaggaggaagaagtggctgaggtggaagaagaagaagccgatgatgacgaggacgatgaggatggtgatgaggtagaggaagaggctgaggaaccctacgaagaagccacagagagaaccaccagcattgccaccaccaccaccaccaccacagagtctgtggaagaggtggttcgaggtaatccaccatttgcttggattccccccacccccaaggaaaagaaagcgtaataccagagttggaaatatccaccctagcaccactgccttccccaatcaaaaacatgtttttttttccaaaaggcttcttatgcttgtgaaatttttttggtttaacaagcaaacaatttcaaataatgtgaaatctttattatacagtttgttttgtaccttgtatatgctgcttggcaaatcccaagttaattctacaagactccgcccaaccaggtagtcatctaatttgacaaacactgagttaggtgactccttggtattcctttggcagtgagtgtttgttatataatattgtctgttaccacctagacgatgagctccttgagggtaaggacttgattttattcagtattgcacagagtgcctggcttgtagtttcgataaatcttagttgagtgagtagttgtgattagatttcattaaagaaggagatttgggccaggcacagtgcctcacacctgtaatcccagcactttgggaggccgaggcaggcggatcacctgaggccaggagttcaagaccagtctggccaacatggtgaaaacccatctctactaaaaatacaaaaatgagccaggcgtggtggcacgcacctgtaatcccagctatttgggaggctgagacaggagaattgcttgaacccaggaggcggaggttgcagtgagctgagatcacaccattgcactccagcctgggtgacagagcaagattgtctcaaaaaaaaaaaaaaaaaaaaagatttggtgagtatcgcattattttatgctatgaattttaacagaggtgatttatgttgagtttacattgttttattgggaagtacggcagtgctttcttcaagaagtaaatatagtattaatgtcttagactttctctattgaattaatgtttgtgttgcaaatattgtgaactaaaagaactaaaggtcatacttgtctccatgaaataaaaacaaacattcagttgatattaaatgaccaaatgttacagaaacgagtaaactgttggattgagttccttaaagagtatgcatttgttccttaaagagttctgcatttcatatctgccatctgcttggcagatagtaaaagatgcttctagagctagattgaatgaatatgtacttactgaattttaatgtactgcaaatacttataaaggtcaaccacaaatgttacagcatttacaaaaagtggctttctctcactttttgctaaagtttaatgatttcagatttattgttctattagagcttaacatgggctattttgtctccctcaactatattcatagttgtcactatagtattttcttccctttgttgcattttttaccttattaaggtgtaatttacatataagtttcatttgcttttaagtatataattcagcggctttaagaaatttgccaagctgtgcaactatcaccataatctaatcttagaacattttcgtcactccagtaagatcacacatactcactcccagttaagccctctactcacctctagccccaagcaacaactaatctactttctgtctctatagatttgcccttttttggactgttattataagtgggatcatataatacatggtcttttgtgtccgacttctttcacttaacacagtatttttgaggttctacatttctttaacttgagcttttaaaattgagattattctgaattaaacactcagcgttagcttaaaatttattgaaagttttacatgttctttgaaaaaaaagaacagagtgcaagatggattaagtttatcattccctacttaatgacagtttcttactcactttagcacataagtaaatgtgctagtaaatgcgcattttgtttaaaccaccatttttcaaatactgagacatgctttctcagggtgtttttcatacaactgttaggaccaactatggcagatctggtcaaatgaacttgttagcctgatgcctgtagcagggaaggacagcttttcagggcttctcttctcgaaacctaaatgaagtgtgaatacaaattacagcagctagcagcctgcagtgggactgaaagtccttggtgaatctccatcaagctgggctgtttaatagaaccagtttagtgtcccattttacttgaaacattagattttgagcacctgcttggtacaagccattttgctaggccatgtggaatggatgatgagcacacacagaccagctaaccctagtggatgttaaaatctcttaggaaatagaagtcaaagaagtacaaagccatctgtgttgtaagaaatgtgaacacagaacctgcctccgagagtaagagggaacttctggattgatcagagaaggttccatggagagcatgacatttgaactagagccaaaagtgtgggtgggtggtgtgtctaccagtggattttgctgtagagtcatcaggactagcaaaacaaatgtggtgccatggaaaggcatatttaggagacaggattggtccaatttaagctagagcagatgtcttttaggttgggaccaaaatatagagaccttcaatgccaggctggcaaagatgggcattaactgcaggtgattaattaacaaatattaattcagaagctactgtgcgctgcagatttttccaggagacaataaagagattttgttttgatgctagtactgttgaggtaacaggtgaacaaggagtgacatcagttatgcagtacaatgagaggatgccacataaacttaggcccatattctagaacaagacaatttgcttgagataaattggtctcattatcgtctgcattagtccagttctttttgcttgagttttgcaggtagtattatttgatattaagacggaacacagagatgttgtattgttttatttcctgtagaaagacgaaggcagttaaaagaatttcataaacaaaacactccaggctaaaggcaaaaaagaaatgaaccttaaaaaataacaagttaataattttgttggcaagaagagcaacaaaagcaaccttctgaaagcaagatacctggtcattgagagatagcaactgttaatgccccagaaatagaggaatctttaatgcaggtccattcattccacctcaaactcctgaacaaaagctctaattgaggcaagtcttcctgggaaagggggcctaacagaaacatgttatggtcagttgtgcccatgcgagataatttttttgtgcttgtagctaattccagtaaagaagtagatgttttagagggtaacgttaaaggggtcagctgcaaagagtccttttcctcctcctcactgttacaaaaggtgacttgtggttcttccctaattgagagcaatggcaacgccataggtgattactcattttgtaaaactctaattacaagtaggttgcttctgtgttcaacataaaaattagaagtgacttgcaaagatgagatactgcagggaggcttacaatcttgttttcagtgttagtgtttcagtacctggaacaaaatgtgatttacagccatcctttctaagaaaattgtcatcattaccaacatattgctactgataccagtccttaatgtgcttcataaaaaactcaataatttcataacccgttaaaaccggaaagaaatggagggaagaaaaataagacacttttagcgtagtcataatcttctctgccatattgtgttagaatcgatgatacccaaatgagaagatgtctgttctctgtcactgattccagtagaataaaattattgtttaaaagtaagcacatccgctgcactccagcctgggcaacagagtgggaccctgtctcaaaaaaataaaaataaaagtgagcacacgattgcaagatctatctggttttgggggcttattgtcatctttggttgttaaaaaaatacttggatattattggttattggtctagtggaataagccattaccgatttgagtacaacagtggtgtatttagatacttgctcctaattttctgttcttcaagaagggattgtacttcagaaaccagagatatcagggtagttttgattgagccataaattctaaattctgattgaaatgggtattgtaataaatggcataatcttttatttaatctagccaattgtgccctgtccagaggaactggacatttcttccttatgttccatttattcagcaactattcgttgtacccctgctgatggctaggctctttgctactgtggaaggcatcgttggggcagagcagacagcattttacctcctgggagactggcagatttttgaagcctttgttgcagatatagattttcacggtcaccactcttgccctttaatgtaatttaaatttttttttttttttttttgacacgggattttgctatgtttcctaggctggattcaaactcctgagttcaaacctcagcctcccaagtagccgggaaaacaggcctcttgtgctttaaagcagtgattctctgtctttaaaccttgtaactatgctgtgtggtggaaattttacttccccgtttaaagccaagatctctaaggccaagaattttttttttttttttttttgagatacagtctcgctctgtcacccaggctggagtgtagtggtgcgatcttggctcactgcaagctcggcctcccgggttcacaccattctcccgcttcagcctcccgagtagctgggactacaggtgcctgccacgatgcccggctaatttttttgtatttttagtagagtcagggtttcaccatgttagccaggatggtctcgatttcctgacctcatgatctgcccaccttggcggcaccccccgccccccgccccccgccccccacaaagtgctgggaatacaggccaccatgcgtggccgaaaaaaatttttttaattggcctgggctgggcgcaatggctcatgcctataatcccagcaccttgggaggccgaggcaggcggataacgaggtcaggagattaaggccatcctggctaacacggtgaaaccccatctgtactaaagatacaaaaattagccaggtgtggtggcatgcgcctgtaatcctagctacacaggaggctgaggcaggagaatcgcttgaacctaggaggcggaggttgcagtgagctgagattgtgccactgcactccagcctgggcaacagagcgaaacttcgtctcaaaaaaagaataaaataaattgtcctgggtcacataactggttaagtgatgaaatcagaatttggacctagataggccaggatatttctgctacactcatgtcaaaattacactttttattttctttataaatacacacaaattcatttcaacctgtgttcccttgtaaatgcatatacctttgatataggcatatattcatctattattttacactgtgcatttctgaatttttagaatttttacttgaagtgatcaggctggcgctgtggctcacgcctgtaatcccagcactttgggaggctgaggtgagcagatcacctgaggtcaggagttagagaccagcctggccaacatggtgaaaccccgtcttcactaaaaatacaaaaaaattagctaggcatggtggcgcgtgcccataatcccagctactcaggtggccaaggcaggggaattgcttggacctgggatgcggaggttgcagtgagctgagattgcgccactgcactccagcctggcgacaagagcgagactccgtctcaaaaaaaaaaaatagaaaaatgatcgggggtccacaaataagagtaatgatcaagggtcagcaaattggggccaaaaatagcctgttttcctgttttctacacaaaagttttattaggcacagcccatcccatttgtttaaaaattgtctatggatgttttcatgttttggaagtagagttgaggatcgcaaaagagattgtgttgcctgcaaaactgaaaacatttactatctggccttttcagtaaaccatttgctaacccctgattctcactataagacggtgactgtgaagttctttctatttcacatactgccatatcaagttgatttcttttgaggtagggtttgtttttttttggttagagatagactagtatagtgtttgagagaatttttatgaccttgggccagttaagtaacctgttttttatgtgtgtagtgtagatggtaatgttatcttgcatgtttcttgtaagaatgactttaggtaacttatgttaaacgcttaccatcatgcccagtaagtgttcaatttacaaactcaagctgtccagattcaaatctttgccttacaagctactaactgtgtaaatttgtataaatcaaataaccttgaatcctcattgcttctttttgtaaaatagggattaataagacctatccaatatttaactattttgtgaggattaaattaattaatttataggaaacactttgcataattcctggtatacagtaactgctcaattaaccttagttgctctcttagttatggttatatcatcattccgatcctccattgcatttgaaacattagcaaactaatgtttactactaatgaggaatgttaaaggtaaaccaataagttgacttttaattataaaaggcataaatgtaacctatccatatctattggtataataaagctgatatttagagagaacattatgttatgattaaaagaaacatttcttgcttaaattttttttgtgtgaatatacactgtatattgaaatatctgcacttaaattttaaatccagctgaaaattggataagatagtattagatgccactgcatttcaagatagagttttatttcttgcaggtattttaagccttgtgggagttcttctgttaagtgaacagatagagacactgatacagatggctctttcaccgtctcatgtgatgataaaagctaaaaggtttgatccgaatattgcttatattgggctaagtgattgaccttggcagaattaaattatttttcttcttctggtgacaattaatctgggagaagtaccatttgatttattgctatacatttcaccaatatccacaaggcacttgtaggtaccagacatggcattggttgctgggggcacagagataggaacaaagtggcttgctcaggttgcttctagccatatctgcattgtccttgagagggatgagtctctcaggcctgcctaggaaggaattttggcagcatggagaagagaaagtgctcagcccggaacaaaagttttcacctactatgttgcagagaagttggcgtatcagtaattataaaggaagaatagggatttactgggtgatagagcaccaaatagaatgaatgcaatacatacttgaagtaaatcagagtagcttgtattgatctcaaggggagaagaaacaaagcttagcttaattctcatgcctctgttgttacttgtttgtaatggacatgacacttacaaggtatcctataattcactaacgggatttttacttatgattaatatttaactctccacaaagcttggggtaaactgtgaacttaacttgctgtgaacccgaacatgaactcacatacttcagttggaggcctcagtagtagcatgctgtacaaaaatgaaactaaagctccagggagtatttgggaacagggcaaaagggtaatggctcctccttatagagcaagcctcaggcctttacctttgtgttttgaagatggagaggatgcacttctactctcgcccgggttgtagcatgcttgctaatgatgtcaagagaactagtgtcagcactgaccatagatgtgacaggtaacagcctgttattttgtgccccatgtcatggcagccattgattccgaggtgtttgatacacactttgatagaggcagagtgaagcaggacatggacaagcatctttccgtgtagtttaatggtctcaatctagaaagcccactcagataattaggttgcttaaaatgtgatgagactagggaatagagccatatagaagtgtgtgtgagagagaattcagtggtttagtatattcacaaagatacacatttgacaccagcctgggcaacatagtgagaacctggctttaccaattaaaaaaaaatagaatagcagaagtaatcagtgaaaggcattttaatacaattatatctagatttattaaaaataaaattttagtccaatttaattaaaggccagaaactagatttttaaagaatattagtctttctcatattttccccaaatcagttgctttaaaaaaaaaaaagtgtgcagatgcctcaggcacaataactgtactcaactcaagaatttgcaattaagaaaaaaaaaaatcaaacctcaaagaagaaatccagcaactcagaggttcaggttcatttaaacatgcatacatttacatgggcacactttttttgttttgttttgtttttaagatggagtttttgtttgtcgcccaggctggagtgcaatggcgcgatctcggctcactgcaacctctgcctcccgggttcaagtgagtctcctctctcagcctcctgagtagctgggattacaggcgcacacaaccgcgcctggctaactgttgtatttttagtagagacaggttttcaccatgttggccaggctggtcttgaactcctgacctcaggtgatccacctgccttggcctcctaaagtgctagcattacaggtgtgagccactgcaccagctgggtgcacctttttgtttgtttgttttgttttgttttgttttgttttgttttgttttgttgacatggagtctcagtcacccaggctgggattcagtggcacgatcttggctcactgcaacctccgtctcccaggttcaagcaattctcaattctcctgcctcagcttcccaagtagctgggactacaggtgtgtgcaaccacacctggctaatttttgtatttttggtagagatgggtttcaccacgttggccagactggtctcgaacttctgacctcaggtgattcacccaccttggcctcccaaagtgctgggttactggtttgagccaccacacccaaccgggcacacgtttttagccaagccataggtctgattaagtacagtcagattccttgagcaggttacaaagctgtggatttgaatggagatctttagttcccttgcagaacaatgagtttccaaaagcagagtggcttacagcctaaccagctgcttctctcagcctttaaccattttgccctcctgaaaattcatctttggtttccaaccacctcttccaatatgcctgactttttgtgattctgttagtagaagagtaaaaagtcaaggggaggcaagaatgaatgaatctcatataaaaatgatgctcaagagaatcccttaattttcaagacagcagcccaaattgtaaacattgagacttttacagtgttaaaaaaaaaaaagtgtttacaggccaggcatggtatctcacacctgttatcccagcactttgggaagctgaggcaggatgatcgcctgaccccaggagtttgcaagcagcctgggccccatagggagaccaaaaaaaaaaattgttgttttggctgtagtgtcacaggcttatagtcccagctactcaggaggctgaggtgggagggtcgctggagcccaggtgaggtcaagcctgcagtgagccgtgatcacaccaccacactccagccttggtgacagtgagaccctgtccaaaaaaaaaaaagattaaggcagaggaaatgttaaaggttacgctatatttagttgataataatggtaagactgttcaggtgttttaactatgagagtagggttgcctctttcttaaatttatatatgttcttattgggtataatttctagacagaatatgcaagtatcacagaatatggatggcaattttatgttgcttgcacgtgactttaggttcttatgtttcatgataggagcaaagaaaagtcttgcttgccaattcttatgattgcatctgttctggaaatttactagcatttgttacccaggatttctgaagtgctggtgactgctgcccagtagtcttggtgggcaaagttactaaaatgcatcacgaatccttctggtgtttgcttgggctatggcagggtttctggaccttagtactattgatgttttgggccagataattgttgcggatgattgtcctgtgcattgtaggatgtttagctgcatcactagcctctactcgatgccagcagcacccccaagtgatgacaatcaaaaatgtcccctgggaggagtaggggatagactctctctggttgcaaaacactgggctatggtgttgagatctgcagtgatgagcagctttagatatgtgaacagaagcccaggcgtggtggctcacacttgtaaccccagcactttgggaggctgaggtgggcggattacttgagatcaggagtttgaggccaacctggccaacatggtgaaaccccgtctctactaaaaatataaaaattagccgggcatgatgatgggtgcctataatcccagctacttgggaggctgaggcaaagaaatcacttgaacctgggaggttgaggttgcagtgagctgagatcgtgccattgcactccagtctcggcagacagactgagatgccgtctcaaaaataaataaataaaaataaaaaagtgaacagagaaatacccgtgcaatactgtgtctcatcccccaaagacggagtcttgctgtcgcccaggctggagtgcagtgacacgatctcagttcactgcaatctctgcctccatggttcaagcgattcacctgcctctgtctccgagtacctgggattacaggtgtgcctcaccaagaccagctaagttttgtgtgttttttttgttttgttgttttttgcttttttttttttttttttttttgagacgaagtctcactctgtcacccaggctggaaggcagtggcacagtcttggctcactgcaacctctgctgcccaggttcaagcgattctcttgcctcagcctcccaagtagctgggattacaggcacctgccactgcgcccggctaatatattttttttttttgtagttttagtagagacagggtttcaccatgttagccaggctgatcttgaactgctgacctcaagtgatccatccatctcggcctcccaaagtgctgggtttacaggcatgagccaccaagcccggctggtctcattttaatgtaagctctaacttctgtatcactgctttgcacattgtagataaccagtgaacattttttattgtataagaaaaagtaaaataaacaaaaatatgccaaagcaaatatgataaatacacatttagtaaggtaaaagcaagtatttgataaaatgtgtaatgtagtctagtagctttatttagaaacagaaaacaacataaaatgttgacttgaaacattgcgtatgcatatttgccatgtagacagtgagatatggaggtaaactgctttcctagttttgttttgtttttttttttttttgttcaaaaggaattcactctccccttgtccactgttataaaatagcaaatggtgattagcatctgtgctgtaaccagagacactgctgttcccagctggaatctgtaggttctttgcctgctagagattgtgacaagaagccagttaacatggagaggtgtacatgtcagtcttccccagaaaaggacatgaaacagtaggaccatccttccaacccatgacctacatctagaggcattctttttttctttttttttttttaaaccggaacagaaatatcatctaattctttctttacagagaagtggtataaggaagtacattctggccaggcacgatggctcatgctgtaatcccagcactttgggaggccgaggtgggtgcatcacctgaggtcaggagtttgagaccagcctggccaacatggtgaaacccctcgctactaaaaatacaaaaattagccgggcgtggtggcacacacctgtggtcccagctactcgggaggctgaagcaggagaatcgcttgaacccgggagacggaggttgcagtaagccgagttcactccattgtactctagcctgggtgacagagcgagattcgtctcaaaaaaaaaaaaagaaaagaaaagaaaaaggaagtatattctaagcccttgaattgatcttggctttcttcattatttttacaagtaaaaataaaaactttgatatttctgatgttctgggatattataggaatgataccacttgaattcagctttctaagaagtctggtatttcaatagtcttaatatgagtaagaaaattatgatcttggtactggatctaaggcagaggtatcgaagctgttttaatgttgcttgagataggacagaacttcagagtaaaataaatgtgtatagacaatctgttcaatctgttcaaattaagttgttgagctgtatatttgaatcttaagactactaattttgttgtatctgtcttttcccaaatatatgtgtacttcttttaataagccaaaacctatgcaacttttactaattcttccctaactacttcttttggaaaatgattaaatcttatgtctcacgttttgacatatctattgcatttaaaagataaggttgatcatgctgcttctcaaactgagatatccattcgagttatccaaggcccttggaaaacaatcgttgttgagtctgtatggggggcctgagtcccaggtggtgttgactctgctggtccatgatcctattttgagtagtagactctagtagcgtctcctgccttccatatggtgcagatttgcagcattgagacaggaagtaagaaactgaaaaggaaaaccattcttacctttggtgttattgttcttggtatattacagataccaacaagtatgaggcaatcctgagacatctacctactgagcttttctttccttaaattcacacctcaagaccaaggaaaccgaaaaactcttacagtctccctacatgtgttcacttgtgcccctatttcctgtcattaacatggtagtgtagccaactcctgctagcctgtaaaagctaattattacagtatagaggaattttgtaagccatagccattagtagcttgaaataccaatggtgggagtatttataccatggcagttggcatacactgtaactcaagagtgttctatttgtttgtttttctagacagtgccagtttcccagcatactcctgtctctcattcagtaagaaaaagcacttccccttattttccaatacaggacatgatatcccgagttttgagcttcttgttaatagcctgttgcacgctaaccacgcagctcagtgaagagcaagtttattcccataacaaacaggaaacaaaggttgaggaaaaaccacagtggtacccttttgtgagtgttccctaacaccgtcacgggagtcctgattagtctaaatactttacaagtaaatctccttcaggtggcattttataaacaatctttcatcatggagagatgagaattgggtcaggtataattagaatgacagatgtattggctagcctgagagaattaacgcaattcagtaaaaaggctagccaactgcggatatcttctagttacttccgtgacaaattagcaccatcctcttgtactgaagcagtgctttcattagcatgcacagctgtttgcatcatctttgtttgtatttcaatccatatttggagcttaagtgagatttgtcataagacttcagttcaagcttgcttgcctaattttacatgcttctatttagtaaaatatgattactaggtcataaatatttgataatttattgccttattagagtaattttctaaacatgttttttgacgactgcttgccactacgtacaagcacttgaaaaatgttcttttctattaaaagtacatggttccagaattgggaaaatcacgttcttaaaaaataaccagttttctattgtgttggcttttaaaattttttcatcagtagaatcaaatgcaaatattgtctgcttatttttcaacagaatacaagtttgattttaataacttaggctcatgaaatgtcaccacgtagtaatacttagaattacagcaataacttaggctaaaaaaataaagttgttatgaactacattgagctcagacagatatatgtattatgtaaacatttatataaaatgtatataaattgtatattgtattatataattatatattgtaatatatagtatataatatataatttataaatataatacataaattatatttataaattataaagtttttatataatatattataatctaatatattataattatatttataaattataacgtttatttgaaatattgaagttttgtatacttagtggattttaatatttatgtcgttttcattttattccactgttacattaaggaagtaacttattacaaaaataaattatatttgtcttacatttgccctttttactctacttaaaattggagaaaaagagttcaagatagggaatttctgtcagaaaggagaaatagttgtattatgtgaagtttaagtagatattcttgtagagtatggagaaaataatgctataaaatgttgccttttaaaaaaaagttcagaaaatatagttcctagctctctctaaatgactagtttgattgtgactgctttcccaaaatttgtaaatttaaaatttatacatcacatggaatatagttttatttcacatacattccagtaggctgagaatacttgaaattcaatgattaaaaatgaaataataataaccagctttgctttattctaaaaccagctttattctttatttaccactttatttacagcgaattatttgctaatctgttaactttgcttcataagaaggcattataattatcgtacatttgaaagtggagattttctccccattctggttgccagtttcacaactgtgttcattctaaatttattaaaatatgtaaaatcagctttctaaccttggttgtccacaaagaatttcactccaatttgaaatatctattcagaactaattttttgtggttgagcattattttttgaacaatgaattgcataatcattttgtataatccagggagctctggcttagattctgtattattttgtgttatactgatttttagaaaatggaatgtagcgttgacacgagcacaaatctcagcaagggcctaccttacaaagataaaatgcgtggagttttattagaagcacatgattttgctttgtgtttcgtatacaccagcatttcagtgtagtaaatggcattttgtcttgaagagtgagcagagttgttacaaaagaaggcataatgcttccttgccagcagaattcagataagtgaatatcagaaaagctatttgtgatcttgaaagtgtaagaaattcaacatcaataaaggattgtggttccttagatagccatgtaagtctttgcctatgtttctaacatttctctttaggaaatattcttgcttttatttttctgaacaaattttctccattattatctctgatatttactttgaacagaaaggtggattggaaatcaaaaaataagtttgatttcaaaaatgatttcaaaatgttagttttctcagtattttacattttgagaagagaacaaagaaggcagatgaagagttttttgttttttcttaaatttgttttcttttcaactttatttttaattgacataataattacatatagtatacattttgaagatacggttttaattttcacaggaatcttatttgggtttagttatataaggtctaattttgcatcctctacatttagtggctgatttataaatttccactgagtgataatagtaattaatgtgaaacaggttttttgctgatgtttttagaagtttcagtagattaggaaggaagaaattatgctattgagaaaaatagaaaatgtaaacataagcatttgaactctctcttgagatatttttatcttccatgaaactagatgcggcttattgaagatgtgtttcaggtctcagtgctctaaaactcttctacttggtgagcatcttgattggttagatctcttactaatatcccattgctagagagggatgtaaaggaaattttctcaaactgagatttccaaatcttccaatctctgagtcaagtaaagagacaaggttagaactcttaggcaaactgaaaaatcaatattcctatattatcattatttttttctttttttgacaccaagtctcactctgtcgcccaggctggagtgcagtggcactattttggctcactgcaatgtacgcttcccaggttcaagtgattccagtgcttcggcctcgcgagtaggtgagattatatgtgcacgccaccatgcccagctaatttttgtatttttagtagagacagggtttcgccatgttgactacgttggtcttgaactcctgacctcaggtgatctgcccacctcggcctcccaaagtgctgggattacaggcttgagccaccatgcctggcttcctatattcatttttttatgtgggctttttaaaatcttttcaatagcaaagacttgacaccaacccaaatgtccatcaatgatagactggattaagaaaatgtggcacatatacaccatgaaatactatgcagccataaaaaaggatgagttcacgtcctttgtagggacatggatgaagctggaaaccatcattctcagcagactatcacaaggacagaaaaccaaactctgcatgttctcactcataggtggaaattgaacaatgagaacacttggacacagggcggggaacatcacacaccagggcctgttgggggggtggggggttgggggagggaaagcatcaggagaaatacctaatgtaaatgacgagtttatgggtgcagcaaacaacatggcacatgtatacctatgtaacaaacctgcacgttgtgcacatgtaccctagaacttaaagtataataaaaaagaaaaaaaattaaaaatcttttctttgagacaattgtagatttacatgcagttgaaagaattaatagaggccgggcgcggtgcctcacgcctgtaatcccagcactttgggaggccaaggcaggcggatcatgaggtcaggagatcgagaccatcctggctaacacagagaaaccccgtgtctactaaaaaatcgaaaaaaattagccggtgtgtggcgggtgcttgtaatcccagctactcaggaggctgaggcaggagaatggcgtgaacctgggaggcggagcttggcgaagcctgcagtgagtggagatagtgccactgcattccagcctgggcaacagagcgagactctgtctcaaaaaaaaaaaaaaaaaaaaaaaaagaattaatacaaagagaccctgcatagtcttcactcagtacagtatcacaactattaaattgacattaatcccttaacactgctttaacccaagtctatgctgctgcttctccgtgttcacttctgagaggcactggccatttcttgtgtgcttattcatactttgtgtaaaagcattagcatcatacatcgctggtgctgaccctaccctcagtcccagcttctcccagagtaggctaagattctcttttctactacatggaaaattgttctggaataataaagggttagcaaaaaagtcagagaaaacaaacagttgcattccctttccctgtagtagagtaggaatataattatgagtgatagaggatacgttccattcctttcccagtcctctccgaagtcagcttcactgctgtaggaagttgctgttctcattatttccctgagggaaagtgttgggaagtgagagttgaggtgatggggaatcagggttgctgacaattgggggaattataacgagaagctctttttcaccaggagaggggttgcatgttaagagaaggcctatctgctcatcctccatgtcagcagatgagaaccagttggacaaggtagctgtctcttagagattgagaagtaacaaaagcacactgtcagtcctgttcttccagcctcacgtacatcttctccatacattatgtatttgacattaaattaacatacactgttacacccattcctgaccgcattatctcaggtagccttttgtatttgagtattgtgggatctgttgctattgcccatgatgcccacttggactccaccaaggcagtgaaactcttgggggccgttcaaagtcaagagtgccaactgcccctaacaggattgggagaaccaaccaacactccccgaatagggactaactcactcttttcttggcctttatgaaaggaaggagttaaggctcttacagctggagactccagcaagagttgtaggctcaacgtgtagcttatactatttacttaattaacatgtaaatggattttgagttctgaatgcttgttctagttgattagggctcatttagcctggcttctacgaattagctataacaaatggtttcatagctgttatagaatgaggcagaagaaaataaaatgaatgtagcattatgtttaattagtggtataggaaaatgttaatataatgccatttagattctggactggggagattgtgcctttatcataagtaagaaattgttgctaggtttcacataagggcacatagttatcatgaatcatctccttcgatcatcattcttttatcccattacttgacttgcacccatccaaaattctaccacttttatttaatatatagactcataaagacaaggtttgtgcatctgcagagctgtgatgttcactgcgaggcccgtggcacacatctataagaagacacatatttggtactctaagatgatacttttttttaatgccaaaatgtgagggtcagcataaattgccaaggcatggtaaattttgttgccaatgctcccgtgactatggggtgaagggattctgtgcctcccttggtagcaatgaccacggtgcttgcaatcccagtgccaattcccggcacagtgcaggctctggaggcactgctgccttgcagtcttattggaattaacactgcctgagtaagagattaataatgggtattgttgtgtcttagaaacgttaaagagcatgtgacatgaatatgtacacattggtgaaggagatacagagaaggaaagcaaagtgaagctgtagatgtttgttacaactgaaggtaagctctgggagcagagaccactgctggctatagttgatgggatccacaatgtcaatacaaatggggactaactattgttttacttccctatacacgttgctctttcagtagatgcaataaagtactggtaaaaccagaggtggctaccatcacgatgatgtcaacaggagggacagtcagcactaagcccagaaggtgtcaaacactccgcaggagaaatgcgccatgcaacggacatgaagatgatctgacactcttcacgtggttttcagatggaaacgtggctacgaaagcatcaacctcattatcatccatcattaaggccatctcactcagtactgctgctttcaaagtccacgctcccaaagcaaattggatttctgtacacaatactcttacaggatgaaacccaaccaacttgttgacgtaagtatcccatctacttcgcaattttatttatcttccaaaattaaaggactggcaccctgatttattaaaagtgaattgggtctagggaccatatcccctctgagttactgacagagcagcttctggcctgtgaagctcaaagccatgcctagatgtgatggatccttgtctttgattggctaattagaatcaatctgttgaaggaccagtggcagtggctcacgcctgtaatcccagcacttagagaggctgaggcaggtgtatcacttgaggccaggagttcaagaccagcctggcctacctggtgaaaccccatctctactaaaaataccaaaaaattagccaggcgtgctggtacaagggtaatcccagctacttgggaggctgaggcgcaagaatcacttgaactcaggaggtagaggttgcagtgagccaagattgtgccactgggcggcagtgcaagaccctgtctcataaaaagaaaaaaagaatctgttgaatattcctaacttggaagtaatgggtgatgcgtggctttcatcttttagaaaggtgttttttcctctgtcagtaaaactaagaagacatctgtgtgtgctaaggcgtcagtctagcaagggcagggcacaaacccagagagagaattgggctgttgtttcacttccaataaaaatgggatatacatgggaggtagagttataattctactcaggattgactttatacatgcaattggatgggtcactgattgactttgaggcaatcagggatgagtgaaactgatcttggggagggtggcaagacatgttgacaggtaagatgtgttttaatgtataacagtgcgtggtgtgtattaatcagttggagttgattgactgcgttttattgtttggaacattcctgcccaagggtcaggtaaatatacaaaatatacaaataatacagatttttaatacataaatatcaattaagtagcataattaaataatacattgttatagttgtacttaatgtgtatgtaaatatatacaaataatacagatttttaatatataaatatcaattaaatagcagaattaataatacgttgttatagatgtacttcatgcatatgtaattaaattattaatgtataatatataaatacatattttaatatacaaataaaatggtcttaaatcagagttaatttaagaccatttatattagtacatatcttaatatacaaatgaatggtcttaagttaatgtcattgagtataagtcacatttacagatatgacatgtgtttccagataaagtcaatggacagacagcttccaacactggaaaacattcaaaatatatgcaattaattttatatttgagttaaggcaatcatttattaaggaaagcaatcagatgtttgtgagggcttaaactttcgcttcataaccaaagcagtttccttacatgaaagttgacttcttaaaaagagaagtttattttttataatggagaattgttgtgatgtgcagataccttccgtcatttcatactcatctaaaagcagccaaatgatcttttcacctttggccggaatccttttattgctaccgagtcctgcactcattaaaccagatgacagtgcatgctctgagaggtgtaaatctctagtcctggtggccagttaaattcctcagtaaatgtttggtagatgctgcctaataaaccagtccaggttgccactgggaggattaaaagaagtaaacgtgtatacatgaacagagagacagtgccttttcatgctaaatgtggttccccacatctcctctgattagaggtgtgctctgaacaagccgagacggggccgtgccgagcaatgatctcccgctggtactttgatgtgactgaagggaagtgtgccccattcttttacggcggatgtggcggcaaccggaacaactttgacacagaagagtactgcatggccgtgtgtggcagcgccagtaagtggacccttcttcgagcctggccacctttcgtctctctcgccactgactctgctttttgtaacagattgattttcctggttcttgggaatgggcctgttgctaccactaaccacatttctgtccacttctctaattgctcagagtctccgcagtatgttcaatcatgagcacacctctccgtctttccctgataaagcatggccatggatgtgttctcttcctagctgtagcacatatgtcttgcaatccagagggacttttgagtgcttctcttttaaacaaagctggagtggctgttttgtcttctgcagccagccgtttctgcaaatgcatacttatgtgtttgtccgtgtacatatgtgttcatgtttatgcatgtgcactacctgtgcagatactgtctaccactggaagcctggctgatgcagcttgagttgcattgataaggtgtatggctgtgatgaatacctttaagttggttcataacatgtcttttattgtgctgatgagggaatgtgattgaattgagctcatgcatctcaaatgccggagggtagaagtgcccgtcttgccccctccgagctcagcacacagacatttgccaggtcaaacttctgcttcttctcttgaaagtagaagaaaacttttgacttaacgtgagaaactttcaatgacataaggctcgaggaacataattttattttttttgtttttttaaagacagggtctcattctgtctcacaggctggagtgcaatggcgtgatcttggctcactgcaacctccgcctcccgggttcaagtgattctcctgcctcagcctccccagcagctaggatcacaggcacatgccactgcgcccggctaattttttgtatttttggtagagacaaggcttcaccatgttgaccaggctggtctcgaactcctgacctcaagtgatccacctgccttggccatccaaagtgctgggattacaggcgtgagccactgcaccccgccagaacataattttcaaagtctttctcttgaacattaagcttttcataattccgggggataaaaatatgaagtcatgatgacttaagtgcatgatgaaattttccccaaagaggtaattctcaggaggtccagtaccagatgtgagacttccatgtcgttaacagacttccaagtgaaattcccaattgtgcttatttatttatttatttatttatttgttgttgttgttcatgagtaggaagtatgaactactcaagaagtaattattcagctcagcttgataactaaaaatgaaactcaataactgtgtattacttttttgagagactcctgcctaattctccgctgtgttgcaagggtggcagccacatttcctgcctgagattcctagggattatataaattgttttgcagcaagatcttaggattaagcaaaacaacagaagggcctgcaccattaatacccccactgtaaaggagcccaggatctaagaggaatgtaatggaaaagctcctgttggtctcctgccatcgccagtgaatgagatgactgcttcagtcccatgtgtgaacaggtgtaggaactgataacctcaagggctttttttttttttttttctggctctgattggatgattgcagcttctggctcaaaggactcccttcttcagtttcaaacaaagcagtcaattaggtcaggtattgcgaacacaatggagaattctgttgcctgcagcctttggaacaaaggccttttgttacagtgattctcactggtttagccggtgggagaggtttcctggcagatttgcaacttttttctccctttccctgggtggattcattttctgaaatatcatgtatagtttttggtaataagagatttatttggttttaattattagcagtgatgaatttgcttcaagagattaaaattctctccacctcaccccagtactgccatcccttcacctaacactctctccctttgatcagtttgggctgggagtgaccagtgggcacctgtccaggtgtcctgggtggcacacagtttgctgagggttttgcaaaaggtcgatgctcccaacagagatgtattagatgaggctagctatgcctgattttagaggggaaaggtgacagaataatgtatgaagaaggcaaaggctgaagatcagttagatgggtggacaagaataagtagagagtataagcctcagcaaacagccagagccgagagccacatgctgtcctatgaatgagtgaaataaatggagtttttgtgaaaaaatgcatcgaagggaattggggatatttggcacaaaaggagcaagaaatcctcttctgttaagaaacctgttgttactcggatatactatcagagacaaaatatccagcattctcaaatgttaacttcttacgaaaatagatcttatgtttatatgttcattttggttttgttggagggaccaaacctaagtgagtgattttgtttgttaggttgtttttttgtcagtggactcgtgcatttcagccatcattcccatgtttctctttttgtttttagttatgttctcttattttttccatagtgtcccaaagtttactcaagactacccaggaacctcttgcccgagatcctgttaaacgtacgttgtcattcacctgagggaagggaagaggggaggaggatgctgcttggttcacataactccagcatcatcaccttctttgcatggttttgtgtttcttgaacacctgtcttagtaaaatgtttcttcccattaccttgcttgtaattacatctgattttgccagacagcttgagatgttgggctaagaacatcattgactaagtttcttctatttctgaccaatttcctttttatttagtctggttttattgaatattatatggacaacatcattgtattgtatttgccattactattttatttcctaaaagctatcagtgtaactgagagcaggcttagcctctcactgcttttgcagaactgaagaacaagggctaggtgcagtggaaggaaagtgactttacttagcaaagctagcaatggggaaatggtccaggctcctgcctcaaagcaaccatctcaaattttggattaaaaaacaaaggcttaaaaaggggagcttggaatgcagggcatgaaggaggggtgaggaggtgctgctatacaggacttgttccaaagacttgagttattatccagttcggtaagtgggctggcgcatcccgcacaatcgggttgtaaattaactgcagccttgaggtgatctcctgatgagggagaattctgaaggtgcctaagtcagtcagtggaacttctaagcaagcattaataattttaataataattataagcgtaattagataatggaagcgctgtgcagggagtgcctggtgggaagaaagagagcaaaggttaccatttcattactaaaactggaaggaaaagaaaggaagaaagatctttaaaatagagtactcggttacatcaagatgccatgatttaacaagagactataatacataagtaacttgtttcctcagaaaaagtacttaatattcatggtattgtagtacatggactaattcgtacacgcagatttcaatttatgtgtgttataagacccggtttcaactttagacatgaagggtcacttttagacattaggaacccctctttctcctctcccagaaggcataatggtaggttagaggtgctcaccttttgactaggaagtagagaaagagcctcctataaagaaatgcattgtccagccactgcaggccttacttacagtgtcttatgttttgtttttatttcagttgtaatatcagacgagtttagttttaaaatgtggttttagtactcatatttgaatttggattccatccagaaatagatttatccagtgttaggttagggatgatatatgccatttatgcttatgattgctggaagaagaggcacaatttcagttgtaacttagatattttataattagcatttgtgtacattatcctgaaaaaaaaaaaccctcatctcaaaactgatgaagccagttatcttttttaaagatgataaattatagatgaaggattaggtattttaaaaaagactgcatcctaaactataaagttttttaatggcctccataaaatattcagaataattcacattatgtataacttttgaaggatgtggtttgtactgctgcaacataaacgtttcttttgctgttgtgaaaaaagcatttttctctaaaaacactgtaagtacagcaagtgggttgacagactaggaaaaagctctagctattccactatagtgttgacataggtacgcatgttgagttgcattgtaccgagcattttcacagatcatttaatttttcttcagaacactttgtgggcattttcctcattccttttgtacatacgagaaaaaatgaggcttcaagagcttagtgacttgtcccaagccatcgaacatggcaggaccaggctttgaaacccaaaatgacgttttggccgcactccacaccaaatggctaagcattggttctgacattgttttgccggttagtgaaatcacatttgcgattcagaagcacattttaagaatacagaaaacagtgaaaagaggatgaagaatgttaacattttttcctaaatgccatgaatagagcacgcatcagtaaattaaatgtctttcccattcttttataaaacagtgattatttttctcttgtttcattttagcatttataagaattctatttttccatttttaataactgatggaaacaagcatcattgtctgataaatttattttcatgctgtacacgtaactaccactttcatcatccactgttccaaacagatactgaaagtctcttttgtaattttctccttcccagtaattttctccatctacttgcagtgtatttgggatcctgacacctttccattctaggaggatgaagtgctttgggcagctatattttcttgtctgcctacagagactattcaatcacagcaagtgaagggttttgcagtgctagtacaaacagacaaggaaaaaaacatataatttctagttatttatagcctgtgcagctatgtggtcttatttatagcaaactgcacatttgatttgaaaaagtcatggtcatctggaggtcaaattcagatggcagactcaattcagagaaaaggagctgaactagaaggtaagcaagcctgttagactgggcaacttggacttgactttgctccttcaacaatctagagccagttggatgatatttctgcacaaaggtggttggttttacaggttgctcagtctaagctgcttctagtcaaataacaaatgtgaaaggagatagaaaaagctcttcagttgaactgataaaagattacacttagggagaaaatgtatgatggtttgcattataaaaacaataatttgccataaatcaggcatttctaggtttcaaacttttgtcataaaaaccaattttgagcattgcaattttagggacatattttattgttgttattttaaataaaaatctaaaccacaaatataaggctgagagctttcattttattcgtgaacataggaattcaaatcattaaaaaaaaaccctttctcatttgggataaagaatcttacgagagctgagttaatttctgacattagttttgcacctgcccatttgggtttaggacagtgcaaaaggtttcacatttaatcttcaaaatatagtatttgtagacaataaaattatataaatatttgtggattcatttatattttaaatatgagagtgtgaccattttttctggtgctgtctccatcagactgcatcccaaaaggcaaacagaccaactccttaatggcatttaatctctcaaagagcatcatgccaatttttagtcagcagattgcaccatgtgatctggccaaagtgtgtcccatctcaggctccttcatttgcgctgacatgtggtacaaacaactaaaccaaggtttctcaacctcagcactattaacattttgattcaaataattaatttttaggagtctgtcctaggcatatgggtgtttagcagtacccctgacccctacccactaaatgccattaacacaactccagctgtgataactaaaaatgtctctagacattgctaaatgtgcccagggggtcacattctggttgagaatcctgttctagagtagtagtttccccacatctgactcagagatagaactctcctggtgtaaacacgtgtactttccacaaatttgggggcatgttgaaatgttagaatgtcagcatcatccaattctcgacagatgtttgaaattgaatttgttagactattgtccaagctctcaatatttgcaaggtaaagtggaagttgctgttgctgtcctgactatagtattgaaggtctcgtagttttcctgctctaatgtaagctactgtggcagcagaagagaaaccagcaaatcccttagtttgaagtcattggttcacctatgcaccacccctttctcctctctgtttcatcttagtttcctagaatcccaggatatgctggaggacaaccatctgtagagatgtcctatagtcttgctacacaggttatttgtactttaggattatgtttgatggccttatagtttgtgcagaggtgtaggcctgaccccatgcaggattgagggagggaaaaagattgatttctaggcacatcagaatggtccagatgacatgaaacagactggtacacttacagagaatatgaaaagaattggaacttaacaagtcaggccccaagttccatccccaggttccaagtttgttgccgcagaagctcataattttcaaatcgtagaaaactcacaccacgcagcctttcaatggaatatgccaccttaaccccagggtcgttgtaaagacaggagccataagacagaagtctgaatgcctaggccatttaatctttggccaaatttgaactattgttcttaatcacactattcttgttcttttcactgtgcagtagcaaatgttagttcccattagcacattctgcaataccattggaactaaaactgccaaattagattaggcaacctgggattacactttgctccccaaccaacctagggagggagaacaattttaaagcattaaaagatgtgatggtgaattaaactacctgtcacgtcagtgccagtatattctatcagattaacaagtgtgaaaagctaaatctttggtatctggaaatgcttagataggaagaatggctttttcttcaaagccataataattagagatgaccctaaaattgaaaggaactggattgcttagcaactcagcattttttaaaaagaagggccatctactttgaatacaggttaaatatctcttctctaaaatgggaccagaagtgcttcagattttggatttcggaatattgatgtattcatgatgaaataacatgaaattcatttatgtttcatgtacaccttatacaaaagtctgaagataattttatacaatttttttttttttttgagatggagtctcgctctgttgcccaggctggagtgcagtggcgtgatctcggctcactgcaacctctgcctcctgggttcaagagatccccctgtctcagcctcccaagtagctggaatgaatgacaggcgcctgccaccacacacagctaatttttgtgttttttagtagagatagggtttcaccatgttggccaggctggtcttgaactcctgacctgaagtgatccaccagcttcggcctcccgaagtacttcgattacacgtgtgagccaccacgcttggcctatacagtatttttgataattttgttcatgaaacaaagtttctgtacgttgcactgtgagagaacaaaggtgttgctatcccagccaccatgatgtcatgtcagtgctcaaaaattatcagattttggagcatttcagattctcagattagagatgttctacctgtggtaaaagaatgttcattatgtctctgctctgttgtttagctatttgccaaaagagggtaagtggatcgtttaataaagtggtcagcaaatatttttcatacaaggccagattatagatattttaggctttgtagatcatgcagtttgtcataactacttaactatgcagtggtagcatgaaagcaacaatagacaataagtaaacaaatagacaaggctgtgttccgataatactacttttataaaagtagccagcagctgggtgcagtggctcacgcctgtaatcccagcactttgggaggccgaggcgggcagatcacctgaggtcaggaattcgagaccagcctggccaacatggcgaaaccccatctctgctaaaaacacaaaaactagctgggcgtggtgatgggcgcctgtaatcccacctactcaggaggctgaggcaggagaatcacttgaacccgggaggcagaggttgcagtgagctgagatcacaccatcgcactccagcctgggggacaagagcgagacttcatctcaagggggaaaaaaaaggtagccagcaagctgatccttggtttaatacagcaggtttttttatttttatttttattttttttccaatagctttggggatacaagtggttttagttacggggatgaagtgtatagtggtgatgtctgagagtttagtgtccccatttcactgagtagtgtacattgtacccaatacgtagttttttatccctctcctccttcccactcttcctcattctgagtctccaatgtccattatgccactctatgcctttgcataatcatagcttagctcccaatttataagggaatacatactgtatttccattcctgattacttcacttagaataatggcctccacctccatccaagttgctgcaaaagacttttattttgtggtttttctggcctactagtattccgtggtatatatacaccacattttctttatccctcattggttgatgggcacttaggttggttccgtatctttgcagttgtgaactgtgcagcagttatttttgaccccaggatgtgcgaggccaggtattttgagagacaccagcaaaggaatctgagtactggctatcaatacctgataattttattaatgagttgagacccagatatgccgtagaggtaaataaccatataaaggaaatatagaagtgtaggagaagattgctctggaaggctggggtaaaatgaaatcagctttatccttaagacctccatagaggttaactgtaccatctccttttactgctacagtttatatgaaactggacaatattgaagattttgacttttcgaactcatctattgagtgttgagcagctatgacaggttatttctttatgtgcctccattaacgaagtcaagaatagcttctgacaaattgacaaaaaacaataacctaaggttaacccattctggacgccagttattgctattgcttcacatatattttttagattcaaacttgaggttgcttttaagttttagtgtgatgtgctgaatagagaatagatgttaataaaaaaataatgccagcattcgttccttcacattcagttcatatatttgaaaaaattcccatgtcagtatgtgtccatggacataaaaaagaaatgtagcttgactagagtaaacacatcatagattatatttttattaccttatgtccatgtgatgcattgatagtgttctccaccaactatgattgcactgactataaaattgtaatacaagggcatattagggggagaatgcctttgttttttcttttgttgttattttgtttttaagagagtctggtattacactggaggatcacaaactgtattttcttgttataaatggctcctctatcttggacttaatggttaggataaatatttgaatgtagaatgcgttaggagttttaactatttttgaaattaggaaaatggagagacactttttttttttttagagacactttttttttaagttataataagcatggcactcggaaagctctgccatgtttcaagattaaagtttcacatgaacgctaacaagtttatatttcactcatatataaatgatcctccttgtctcctttcctaaattatagccatctcaaatgacaacattgctgggtcggtatcaaatagcattttcaatgataaggcaatgatttatataggtcttaatttgttttaatcttctgttaccaaggctgtagagataaattgcttttctgctgatgaaaggagactaacccaattttcttgttagaatctaatattaatatatcgactgaatgccattcataagccttggtttagggaaacattcagccttctggcctgttggagatggccacggtcattgctgtttgaaggtgggtcatttcttcttttgtgtcctgagtccattgtgactgtaaaattatgggtcaccccagagcctgaggaaacaaatgcatatcaaaatgataggggcaatctttcacagtgcctttaattttgaccccacattcttatatgaatgtgaagtaccacattagtatgaatatgaaatggagtgctccgcaatgattacaaaatcagaactaaaatgagggaaatcagtgcatgtacagttcaacttaatggattatcctctaaggagtcttcagacaggctaggagagtgacgtctgcctcatcctgaagatattagcaggttttcccctgttttaaagtaacttcccttcaaatgctaacagttttctcagaggaaacacaggtatggaaaatgtttcgttggtgtcttggccccagtgatggaggagcattttgtgataggaacgttgggtgcagcatcgccatttatgaataaactgaaagctaacctgtgttacttcaccccagaaaacagagctctggcaggtattgagaatagatcacagtgtgaagtggcagtattgtgacaagcatgcgtgtatcagtattaaaattgaaatgagccctcacgcacatgtgaaagcagtttctcccgttttcatattcagttccctgaggtaatacagcattttggtgtgagagaaagaagggaatctgacccttctcgtgtgggaagggggctgagggcaacaacctcctgtgacagccaccctggtccaagccaccttcatctttgtctcctttttttttttttttttttttgagacagagtttcgctgttatcacccaggctggggtgcaatggcacaatcttggctcaccacaacttccgcctcccgggttcaagcaattctcctgcctcagcctcccgagtagctgggattacaggcgcctgccaccacgcccagctaattttagtatttttagtagagacagagtttctccatgttggtcaggctggtctcaaactcctgacctcaggtgatctgcccgcctcagactcccaaagtgctgggattacaggcgtgagccactgcacccagcctgtcttttcctcttaaaagatcttccttctacttttgtcccatagcagccagagtgatccttcaacaaaacgccccatcacatatactccccctcaaacagcccacgctggtccctcagaatccttactgtggctttaaggctgtacatgatgtcccccatttcttccctgcctctcccactacttcctctcttgcttctttagctctggccatgcgggtctcgtggaatttgccagccagcttcaactcttagggcttccgtgctagttttgtcatctgcctgccatgtccttccagcagccagctgggaagatctgaatgtcacctcctcacttaagactctgcctggtcgctcacttactgcggtctacctttcccctctcccctcagctctcccgatccttctgaactctgctctgtttttctttttcctctttttctccataatacaaatcacatattaacaatatgacttactggcttttaaaaaattcttgtggtaattgtttctttccctagaatataattccaccaggatcagggccttcatgtttttctcattggtttctcccatgtgcctcacatataataagggctgcaatgttggtgggctggaggaataaaagaatgaacaggcgcactaaaggcaggatagtttgtccatgtcagagctgctgtctcagctgctttgatacctctgacttcccagggtggcaaagaataaggatgtggcttatgtagaaggcgttagtcatccaaaatgccactgtatatttggaagcaaatattcaccttgaagcagtgatgtactaggaattagaactgcttttctgttacattttttcatttgttatgagtgtttagatacacatgatcactattaaaaggaagggaggtaatagcctatatatcctaccatgcccctcaaggctctgttaggagactaaaatacaaaggtcatttaaaaagttaaaagcttatgcatgtgatgttggtattgctgctaatgactaggcatctagaggtcaaaacctagagctaaggatattgaaccctgtgttttgtctcgttttaagtctaggtttttgtggaggggggaacatacctagccagcttgcttgcagaaggcatgagtgagcaggctgaaggagggacccaaggccagaacgtcctccatattctagctccatgggctctttcacttgatccctgctttatgacccaacttctgttgaaggatttgccagatagtgtttggggcaggaacagctgtttcatagaaaacaagccaacggacatcataacaaagcatatggttgttttgccaagttgtgctgctcattaacaaaacaaaacaacaaaaaccctttacagtgccccagcatgtggatggattggccctttactactctaaaaattagctttacagcctttttatggcttacccaatcttaacagactttatttgtgtgtgtttagggatgcaaatgggtatgttaaatgatagtgttttgcctctacgcaataaaatagggtaattttttcttcccatgtattaaacgagaacacagaacatgcctagcatggtgggctctgatgaaaagaggctgttatcatttggccaacatggaaatcctagcctttatttatttatttatttgagacggagtgccaacatggaaatcctagcctttatttatttgtttgtttgtttgtttgagacggagtttcgctcttgtagcccagactggggtgcactggcatgatctcggctcaccgcaacctccgcctcccaggttcaagcgattctcctgcctcagcctcccaagtagctgggattacaggcatgcgccaccacaccctgctaatttttttattttattttattttagtagagacggggtttctccatgttgatcaggctggtctcaaacttccgtccacctcggcctcccaaagtgctgggattacaggtgtgagccaccccatccggccgaaatcctagcctttatcagaggttccgtggaatctcagaggtctgtgagcaggataaactgctttatggtagtttaaaatgcaaaaccagaaataaaccctcctaaagccagtttgtttccactttctaagtggttacagtgacctgtgttttaagtaccttaaatatatcagtgacctgctgatatacagcttcctgtttcctctgtgtcctgtgacatatcctgacattccttgagccccactcccttcccaaaaggaagtaccttgatgggtgaggacatagggcacacgtgtctctggccttctgtggacataatcacaaaatggtagtcagtcctatgaatttaatctctttaggatataaggatattcacgaaatagaagttgagctctctggacatactccaccttaaaattgctctctccttccgggatcctcaccagctgcagagcagtagtaatgaactattaaattcatttaacaatatcagcatatgctatccttctctgcttgactagacagtaatctggcttgctggttggtatgaatataggataatttcactcacactaattgagatggggagtttgtatgaatggctgaaaaatttgagttaaagataaaaagagacacagcttcctcaactatgggaaataactgggactgttaacaaagatttacttgaagagaaattgtattgctcagggttctccagagaaacaggaccaataggatatatatgtataggaagagattgattctgcagaattgactcacacaacaattatggaggctaagtcccacaatctgttgtctgcaagttggagacccaggagagctggtggtatgatttagtccaaatctaaaggcctgagaaccagggaagacaatggtgtaaatttcagtccagggagaagagaagaccaatatcctgactcaggcagccaggaaataaaaagggtgaactgctccatcctctgcccttttgttttcagaccctcagcagatcgggtgattcctgcccatgttgaggagggtgatttactttactgagtgcaccaattccgatgctaatctcatccagaagcaccctcacaaagacactcagaaacaatgtttaatctgggcaccttgcggcccaatcaagttggcacagaaaattaattaccacagaaatatttctggattcaatggattaagttggtaatatagtattcatattcatttccacgtgcctaaaaagaaggtttttatcctttttaatatcctcagtcctattaaacatacctcacattcatgttccatggttattctcttattatgttgctaagtgcatttctacttaggccaatctgattatagtgattcagattatagtgtttatcttctttcctttatacagtagacagtgttcgcaaaccataggagctgaaaaaatttccttcttatatagtaagttttatgattccagttttccaaaggggtgcttatgttatggttataacagttacagccagatgactatcttcatcagcaggtataaccccaaatatttatacattttcatttgtttcaaacataaaatatggtttgcctaaacatgtcattctgccagattggactatgcaaaagaatgttactgttttattttctgcttttactttaacttgttctcatttgagctctaccagttaagatgagaagatgactaaagctagggaagcacattttaaatgctaaataccatgttcatttcaagttgggaacttgaaatgcaagtatttttaacttaatcattaagttaaagtcagtaagaacgtggtatttagcatttattcattttaacttaatgattaagttaaaaatacttgcatattggtttgcttgaagctatggagaaaaacatttaccttttttccaaaaaggtcttaatattcaaaattattgtttcaatcttacaaattaacaatttacttatttttgatactttcggccttttttatgtgggctacacctaacattttttgaaaaatacatactgcttttcctgtaggttgcactttgtgatcctgtgtgtaattcattttcagtggttctattttatttattttttgttagtttgtattttcttttgtttctttttctcaatttttaaaattttaaaacttgtccttttcttttttttctttattattgcactcttctaccaaaacattttcagtggctttgaataaaagtatcagaactttcccgtggttagcattagctctgagatttgaacaggatgtattaagcagaggaggagggaaggccactaacatgtatgagctccactgtgtgtcaccctctctgccggatgacttacatgtggtatggtatctcattttcccagctctcctatcatgtcctgcggcatgttatcaccacttgataaaaaaattgaaacatggagtgcttaagtttcctgccccaggtcacagctgatctgaaaaagaaatgggattcaaatccaaatgtgcttaattgcaaatccccacatgactctttccttccttccttccttcccccgttgctgccaatgtaagaaggaacaccactccctcatttgctacagagaagacaggggcagctgtgtaaaggcaccaggaatatgccctgcctccttccttccacttgaaagcaacatctggatagacactcaactgcttttattttttgaaaaatgattattaatcaggattgaagtggagggaaaaaatcaaaacgaatgtttctttttaaaatgaaagatactgtttaattatttaacagccttccggttttagttaatatctttgaagactttggattaagattccagacattttcttgaaggatgtagaaaacgtatttaacttcaagtttagtttcaaaatgacttagctatcaattcttctcattgaagtcctctttgagatattatatcccaaatgtaatacacaggtaataattcaataggaatacttggaacattggtgatatttgaataaccttttgaatgaaacaattgatttgatctcaaaagatagtgaaaacgtctcattttgttttttatgttaaatatgcttcctcttaagtcaaaattcttttttctttttgcttttaagctcataaatactctgaattctcactaatcttttggaaaattgcttgtataggtattataattcacttggctcatgagttacataatatagcagtatatgttgcaattcaaatattgcttagcagtattagttgaattcaaaatagaaatcactttctttttgacaactagcataatgaattcattgactattgtcaaatttatgaagacagaaaagtccttttgtgattcaaaaatgtgtttattgatgtttatatatcttttgtcgtgtttccatactgtctcatgaaggttgtcttcgtaattcagttatctaaatacatcatacatttaccttttccctggggtgccgttattctacaacaggctaattacagatatctgtggtttctgcaggagtcttagtgtatgatattgatgatatcatcatttactttcaaaattgcaaaatagtaatttaggaaagcatggggatttggaaaaacatgtcttcagcaccaactgtttttgctctttgcatgcttgtttcgtaaagaactctaatgctataattgcaaaatggaccattttaaagatttttccttcattctgtacttgggagtggtgaaagacatccttactgtgctgcacagtgtctcatggtgttctcttaaacagcattaacgtcttgtatgcgctgctttactaaattctctgttctgagaaataactgaaaatacggctttctattaaacgagtggattattctgttgttgttggcttttttttctcaaacctccttctcttctactttatagttcctacaacagcagccagtacccctgatgccgttgacaagtatctcgagacacctggggatgagaatgaacatgcccatttccagaaagccaaagagaggcttgaggccaagcaccgagagagaatgtcccaggtaagtctggctcttccatcattcagccctacgatattgggaaacctgagcttgcctctgcctcagtctccccacaggcctgctggctttatcaagatctttaaagatgtaaagttctaattttaaatgtttactgtgtgggcacagtttgtgggttttttgcatcctccgtgaacatgctgcctaggaaggatccaggtatagttggattttgtaagcacaaattaaatgatgtctgtaacattctctctggcgaagaaaggtacttggcattattattctgtgtatatgtagtacctgtaatcaacatgttgtaaattaaaatccatcaaaatgctctttagtaaagatgaggttttgtattaaatcccagactgttataattgtgaacctacgattgtttacagtctgtaaaatcatagagacttaaaactgagctgaaccatagtgattatttcatctagtctcctaagtgatacatagtggaatagaggttcgagagagtggcttcccattttagcacaaagcaaaatcagtgagccagagacaacatttagaatccaggcctttcttgctcctagtacagtactcctttcattatactttgctgaaaaaaaaaaaaaaaaaaaaaacctgttttggtttggtttgtttttttttagcaggtccttaattaagcaaattaaaaaataacttatgtctaaaacatggctaatccatatatactatcaactacaattgaagctatgtctgctaccaggcactggatgttgtattggagtttgataatatggaggattttagcccttgctcagattcctcattcattcattcattcaatcaacaaatatggacttattattttccagtcacttttctgatttgtagtctacaaacctaggagtgaatgtggggggaaaagaagtaggacataaaagtgaatgaataaagatctcaggttaaagtaagccattcatttttagtgttaatattctgtggcaaatatcagaagataggagaaatttttgtcttagcacagatgcttaatctcttgagagacattaaatgcaatttatgaattagactgctgcgtattttctaagatcacagtcagtctttagtagacaattaatctttcctgtaatttctgatctgggtccctgctgaccccaggaagattcctccctcccagggccaaatgaatggcccctgagcatgtctttcccatgcaaaccagtcaatcaaaagctccttactcccaaccaccttcttatactctgggccactattcacctgctctaatcaccccaggaccaggtaccagaccactagggacaacctcatgccccatcaccattatttgaactaatcagtcctaaacccgcctaccctgcttcgctcattctttccatgaaaaccacaataaaaggctcttgctcatgttttcccctcctgaccaaccctggtgcttcccatatgaccctgcatgtagtggcatgtaccggcttcttgggagctgagtaacaaactgtcttttccatgataatcatctcctgacctcttggcctcacctgaataataagaaaatctacccttgaaaacataaaactaatagtttatctagaaaggtacaacacaggtactgttttttgtttgtttgttttgttttttgtttgtttgttttgccttaagatgaataacaatacttggatctactttggtataataacataaagaggaaaaaagccttataatcacagtacttttggctctggaatataatgtgcagttctagtggctgcccacgatgaaaacctaacagctaattgaactagaaagctagccacagggaattattaagttttcacctgatgccaagaaaatcagatctttccttaggaaagacacaggcactgttcggaaagcattggaggactatgaatcatacttattgccactgaaatgtcctcatttgaatttacatcctatctcccttctttatgaagctttcagaggcttcctgtgccctcacaaatccacttctgggcacatgaagtcgtaaaaaaagaacaatgacaaaaataaacaccgaatgctcagcttgtcattttcagcgcctaccactgtaccctgactctggtcttcctaccacctcttccttctcaactgctacccttgctttctgtacagcgttaagctgctgttctgatcaggccactctgctcatcgtctgttcatctcatcttgggcttccctttgcccttggcattgagttcttctggaaatgccctcccactcttcttcacgctgacacatctcacccattccttacaccccacttcatactcagaatgagacaggcagtcattgctcttacctttcatttaattctaaatatttgctccccggttttgttagtgatttctggacacacctgcattatctttccaagctggatagaaaccttgagacctcaagtcatgaagcctgctacctgcattcatcgtggacccactgtagcattttttttaatgtgtgtttttttaatcctggattttttctcctagtatatcttgttcatttttgaccttattaagaaaacttatttcaaattctctgttagttttagatgtgacaggtcttctttaaaataataatttaacttttagcacatctgtgtaacttgtgacttagttcatgattttgtagattttgttcatcttttagtcatcagatatatctgatataacctaagagatgttgtcccagagcagagaatgttgtctactagattccagtggtcataggaatgtgagacacctgaaatcaatatgtatcttcatagtctgtggtgctgaaatctagggacttttcaactttaaacttgcctgcctcttaaatctctacttagtagtagtcattttctctgcatgaaacagccaagtctttgaagattgataaatccaaatgaaattgatacctttgtgcctgcagtggaaaattgctttataagaatccatagagccactgcaagggccaggtcctgagaattttaaattttaaaaattgtgcggttttttaaattaagttttattgtagtttttgttatatgttttcttacaaatacagaggattttggaattttttcatattttggtttgttgttgccattgtggagtataactctaaacctgtagatttttgttgctaaacctgtagatttttgttgctatatgtcgtgactagcatctagtcaaatagaaatctacagctgaaccatgtgtgagcacttttattacttataaacttactacttttagtatatgcttaaaatgaagtccttcaaattgaaagctgacccaactcataggtttttatttcttttcttttttggagatggagtcttgctctgtcacccagctggagtgcagtggcacaatctagactcactgcaacctccaactccctggttcaagcgattctcctgcctcagcctccccagtaactgggattacaggcacgtgccaccacgccgagctaatttttgtatttttagtagagacagggtttcaccatgttggccaggatggtctcgatctcctgaccttgtgatccacccgcctgggcctcccaaagtgctgggattataggcatgagccactgtgcctggcctaggtttttatttttaagataagcagcaacattttaagagcgcccctttctcctgtcactaaatataaataaacttagctcacctaatgaattttttattttataataaaaaattgggtaccacagggtacaaaaacatgatctttagagccacagagatcttggtttatattcttccctctcccttttttacctgcatagcctcgagctggtaccttaacctggttcgtaaaatgggatggccctggctaatctcacaagctgttgtgaggaatcaattaaattagatagattttgtaaagctcttaatacagggtcagcagtaatgctacttgttatcagtcccacagtgaaattcactgttcacagggagatggtcagcctacatatagtgtgtattcatttgcagtagagtcttagtgggatggtgcaggtgatttgtttatttgtgggggtataggatattgttaaattgttctgaaaatcaaaatgtgagttaatttctatagtaatgcttatttgcaactcattagctaaataaatctctttaattatttcatggattcccccagcttaaagcttaaagtccagtttcttaaagtgtatgaggtaaaatggaaaaaatgtaaatgtaatatgggaaatcagttctcacattgcagtagaacattgaacttctatctcaaactaattttgagattccttgcttgaagaattgttggtagagtaccaccactgtgaacattcccaaagcaggaaattgaaatatttatattgcaaggcttatctcatctataaagcaaagatggtcttccatttcccccttgcccacaggttccctttattaacttggtagaagcaccaaagcagatgggacaatatgtttcttttcttccatgttctattcttgttcattgcagcagggcatttgtcccaattttgctgtgaaccttgagattatttttgatatgcttttcaagtgtaatgaaatatttattccatcttgtttcctccatggttttacaaaaacaacaagaagaagctaattgcctatcatatacaaagaatgaatgccaatggacaataaaatctgtaattaggaacccacatggtgatttgatatagtattgtctcatagaagtcttctatctatagttatttattccaagcctctttttctttcccatcttgaagtatgttagaagagtctattccttaaggctaagtacctacaaaaaacaggctcttataatacagtaatcaagttttctcatgctttgggagtacacagagtatgcaagtacacatctggcaccaaaccaatattttgtttccttgatctttcttcattttacctagttcagagttgcacttcaaacaaattctacttgtcatacacttgaaaaggcagctgtaggtggtaggaagttaatattttctttgaacaacatacagaggtgcagacttttactttttgtatcaggttaatgagtgaacttctctcagggaaatccaggtgaacatcaaagttgagagcaggaagcattgatttcctacaaaacacattcacctgatatcttagtcagtttgtgttgctataatagaataccccagcctggataatctgtaaagaaaaagaagtttaaaattcggctctcagttttgcaggtggggaagtccaagaacatggtgctggcatctgttgaggacttccttgctgtatcatatatggtggaaggaagaagggcaagaggagggcaaaactgagttttataacaacccacttctcacaataacaaacccactccccccataatgatactaatttactcatgaggacagagactgaatcacctcttacaggacttacccctcaacattgttgcactggggattaagtttccaacacatgctttttaggggttacattcaaaccatagcagttggttactaaattagtgctacttgtaaaaaaatacatgtttgctgcattcagaatattacatgttttcttggagtttttggaaggacttagcgtaatccttgctgttcatgacttaggttggcaagctcaaagggccttaattccccatcagttctttaaagggggataggtcttaggatattagacagcagaagtcttctttttcttcccccattatgtactgctttttggcattgtattcatgacacacacacacataaaatgtcatattttctttaaagtcaaaatatacagtttaaaatggtttcagttgctttcataagagagtaaaacttaggtgttcagtttaatattggaagaccttgttcagttaatgtgtgccttccatgaatagttggtatttgttcacatcaaatcaaatgactgtcagttctcggggtaaaaaaagaccaaccttgactcaaaaagctatattcctgcaataaatatgaacatttatgtttaatatactgctgtgattaattatttatatcctagtgggaggtcaaatattcttcagataggaaggggtatgtaataaattttttaaatatctaaaatgacaaaaatagaggaaaaacataatcatccatcctattaagtctgtattcaaaggatgaactgatgattttaaattcaaatgtttccttaatttataggtcatgagagaatgggaagaggcagaacgtcaagcaaagaacttgcctaaagctgataagaaggcagttatccaggtaaaacctgaacccatttcctaccaaacatcacatgccagcagtctttttaatgagtgtctgcaggtttacctttatctgccagcacctcacgtgtgattgttcatagtcccatgaacttcagctgttcttaatcattgtctagtaattgagttgtttaaatcctgccttatatttgctcccaattatttcaagttataattcattgccataaaactcacattgtaacttgcaatctactttttattaataatacatcttttcagtcaccacaatcttctgctgcttctccctccagcaaaaattatgagaatttgaatttttgatggaaaccagtctcaaaattaccttaagtaaaccaacagtttattatggtcaattacttgaggtactgttagtaagagagggatttttttttaatatgtaatataagagtttcaagagtgcatatatttatccaaagttattagtcaaatcagccttcagagagcctatgaaatactgattttcaatgagaaagtaggtttgatgagggttggagagtgcaagaaagtgaagtaagctataaaacgtagaattagtcaatgttggaatgactatgcagtctttaggatactttttagcactagaagaaaatggaataggatgtcttttttagaagacttgaaattgctgcttcatcctacttattcagtccccatggacatatgtgtttatgatggcagcatttccaggagaaagtggaatctttggaacaggaagcagccaacgagagacagcagctggtggagacacacatggccagagtggaagccatgctcaatgaccgccgccgcctggccctggagaactacatcaccgctctgcaggctgttcctcctcgggtaggtctcgctgcagccgagttcacacttcaggtcacagcacagacagtaagggtggggcactgggaactggaagccatacaaaaagaatgaggagaaatgccttgagcactgttattcagaggttcaacccctgtccattccatcttgaaggtcaaagggtcacagggcagctacctccacaaggtcatctctacacagcaggtactcacacttccccacagagcagccagacaggactcccagggactcacattgcaagccctgacttgatttaatattcctgaggtggtgacaattgatggcatagttcaagttcgaacacaaaagctggaaggatgtcttccagtcccttcaggctgctgtaacagaataccatagactgggtaccttatcagcaacagaagtttatttctcacagttgcagaggctgagaagtccaagatcaagacatcagcatacttggttgtctggtgaaagtttgcttcctggttcatagaacttaaattttgtttatcttttatttattttatttttgtttttgtttgtattttgctgtatcctcatatggtggaatgggcaagagagctctctgggccctcttttataagggtactaatgtcaatcttgaaggctctgccctcatgcctaattgtctcccaaagctttcaccctcaaatagcatcacactgtggcttaggtttcaacatatgaattgggggtgggagagacacaaacattcagaccatggcaaaggattttagaagtaaccttgcccagccccctcatcatgtaagtataataatataactaaggtcaaggaaagttgagatttggctgagttgtaagaatttttagtggaccagaaagaattagaactcaaatttccatctcagagcagtggccatattctctgtggggaagcatttgtcagtcatgacattagcaatgatgagacttattcatggttttcagtgatcattgccccaaaaaggcatgttgagtggtacaggcatagatgtgttcaccggcattctgtgggagagcttacttggaatggaaggaactttctgagcatgagtgtgtaacttatgtccacttgttctttttttttttttttttttttaaatgagatggagtctcactctgtcacccaggctggagtgcagtggtgcaatctcagctcactgcaacttctgtctcctgggtttaagcaattctcatgcctcagcctcccaagtacctaggattacaggtgagccacgacacccagctaatttttgtattttagtagagacagggtttcaacatgttggccaggctgatctcgaactcctgacctcaggtgatccacccacctcggcctcccacagtgctgggattacaggcgtgaaccaccatgcccagccatttgttctttctgtttgtcattgagcaagggatattgaaagctctgcctgtgattgtggaccgggccatttttctaaacagtgctatcagtttttattttgtatagtttgaggctgtgtttttaggcgtgtaaatgttccaggctgttaggccctccttgagcctcttcttatgaaatgatctttttatcctttgtaatgttttgctccaaaatctactttaatattaataaagctattccagctttcttttgattaatattaatgtggtgcatttttccatccttatactcttattgaccttgtttgtctttatatttgaagtgtattttttgtaggcagcatgtaattgggtcttgcgttttcctttggattgggaagaccatgtacactgaatgaggttatggatatggttgtcactgaatctgtcatcttgatatttgtttgctatttgtccagtctgttccttgttcttcttttttcctcttttttttttggattaattagaaattttttatgattctattttatctcttttgttggtttgtaagttacaactagtttgttattttactggtttatctcctttgtgggtttataagttataactagtttgttattttactggttgctttaggcttatagaaaacattctaaacttgtcacgatgatgttatgtcagttcaaatgatattataccactccacagacagtactttacaaaagtacttccatttttcatctctctctctctctgtaagcggttgttgtcatactttttccttactacattgttgatgtttttctttaaacagttattttttaatgagttgtaaatttaaaaaaaaaacaacatgtttacccatgaagtcatcattttgggtgctgtaaactctttgcgcagatccagctggtatcattttccttctgcctgagagatttcctttaaaatgtcttagagactgggcttggtggcttgtacctgcaatcccagcaactcaggaggttgagataggagatcacttgaacccaggagttcgagactgcagtgagctgtgattgcatgactgtactcccatctgggtgacaaagggcatcctgtctctttaaaaaaaaaagtttgagtgcacataagttggtgatgaaatctttgtttggctttgaccaaaaatgtcccttttatacctttggttttgaaaaatatttttgctgggtaaaaaatactggattgaggtttctctttcactgcctgaaagatgatactctgctgtcttatttgtgttgatatctttatctttatttctctaaaaataacatgtcttttttttctgtttttacagttttctctatatcactggtttttaacaatttaattttgatatgccatggtatcattcagtctgcccttaattccatctggccgtttttcatcttatcacctcacatactgtagttgttgtatatagaaatttaacctgggctacccccaacacccataatatcgtctgtatcttaacttttgaacctatggaatacagttattatatgaaaactgtttaaatatccatgtttgctaattctaacatctctgtcaactttgaatcaattttgattgcttattattacatgtggcatttccctgtatcattttatgcctcataattttttattaaatgtcggacgctgaatttaaacctgttgaatgctaggtgtttttgtaatattcttgagcttttttctgtcacatagttgagttacttggaaacagtttgatccttttgagctttgcatttttagatttgttaggtgggatagaagcagttatcagcctaggactagttattccttactagtgaggcaagacccttctcagtcatctaccatgaatgttaagttttctcacctgactcgtgggaagaggcattattcctgtccctgtgtgaacaccaagcactgttaatgctaattctttttggtgattttccccctggcttcagtttctttcacatgcatgtacccatcattactcagctatattctcagggatcactctgcacatctctggattctcttttggagcaactctctcctcaccaataccctgtcctgtgaattacaactaccttgatctctccacacacttcatgtcctccactccacgagtcctctaggctctgtgtgggtttccccacctgaaaccatgacctggaaattcagggccatgagtttggcagctgtaagtcctcatttgtttccccttttcaggaatcagtgtccttcacctgatgtctaatgtcttgcagaaatgttgtttatgccaggtgtggtggctcacgcctgtaatcccagcactttgggaggccaaggcgggcggatcacgaggtcaagagatcaagaccatcctggccaacatggtgaaccccgtctctactaaaaatacaaaaaattagccaggtgtggtggcgcacacctgtagtcccagctactcaggaggctgaggcaggagaatcacctgaacctgggaggcagaggttgcagtgagccgagattgtgccactgcactccagtgtggtgacagagcaagactccatctcaaaaaaaaaaaagaaacgctgtttgtatatgaatatattgtccagttattggtggttcaggcaggagggtaaatccagttcttctcactcaatcttggctggaattgtttgtgcattttatgcaacttaaccagaaagtcacccatttgcaccgattttcctcaccattttgatttttctttctatggataaagttacagtgcacagaaagccatgaggagccgttaaagagctcgtggcattcttccaagacgtaagatactatttaccctgttctaccgatgatatcactgcaacctcgggagatggagcggctggttcagggtgacactgctgggaagggagagggtagagccgcgagtcactgtggtgccttctcactagaacgagcttcctctctaaacaaagagcttttgaaaaagaatattcatattagcgttttcattttctatttgccaaaattctctatcttagcaaggcacttgtcaggaaatttttttttatatctctgcagaacaaaagttccttggttcctctcttttttggagaacacgctttcaggagaggagccgtgtgatcatttgccagagaaggataggctggtgggtgctgagaccagaatctttatagcagaaacttgtgaagcgttccagctgaaagtccaatctctaaagtaagatctttgctaaatggacattgatgggactaaaaataagctgagggctgaatggaggctttaacaaatgtacatttaaactctcagtttagtctcatcagccatcacaggaaaggcagtggcaagaatgtttgccgaagtgtcatcttttatcaaaggggataattttagagtggttgtaatcgtgcttattgtgggcctccgcattgcttcatatggaattaggcaacatgttcatttgaaaaaaaaattaaaaactggattaggaagaaatattttactgtcaaaaatcagatcactgttgttgattgatctaaggattcctgttaaattcttaactcggatttatttatttatttatttattttctctctctctctctctttctctgtttctctttctctcctgccttccttccttccctccctccctccttccttcttcccttcctttcctttcctttccttttctcttcccctcccctcttctcttctctaatcttctcttttcttttctcttttcttttcttttcttttgttttcttttcttttcttttcagggtcttgctctttcacccaggctggcatgcagtggtccagtcgtagctcactgcagccccaacctcctgggctcaagcaatccttttgcctcagcctcatgagagttgggtctacagaagctccaccatgtgtggctaatttttaaaaaatttttgtaaagacagggtctcgctgtgttacccaggctagtcttgaacttctggcctcaagcgatcctttcacctcggctttttaaagtgctgatattacaggcatgagccaccatgactcacctttaaatctttcctttgtaataaaatgtggctgggtggtcacaggcctggagtctagggggcattacttgccatttttgttaagttaccatctttaggtgttcatttaagttttaatgttgtatggcttgacctggcacttaggtctgcactttggcaggcacaagaaaattgtaaataccttcttttttttttttttttttttttttttgagacagagtcttgctttgtcgcccaggctggagtgcagtggcgtgatcttggctcactgcaagctccgccttctgggttcacaccattctccagcctcagcctctcaagtagctgggactacaggcacccgccaccatgcctggctaatgtttttttttttttgtatttttagtagagacgggctttcaccgtgttagccaggttggtctggatctcctgacctcgtgatccgccagcctccgcctcccaaagtgctgagattgcaggcgtaattaaatgccttcttgaggacttttataccttcctcttgaagacataaatccagagcttactggtggttgtctgaaaaagatcacatcttgtaataggagtcatacataaatatttctgagatctccctcatacttaaccaccgtgcctggaaaatgcagacaactgtattcagtaaatggtatttgaatataagtaaatcaaaagtgtcgtttccatagattctgtagatgttaccacttagaataattacctgtctaacccttaacaaattctaccgtatattctcagactttgcaaacacgggattccaaaacaatgtggattgttttcagtttctttgaagctcagatttaaatcatacttttactcagtttttaaacctaaacgtggaagtgttatgagatgttgtttttgtgcagctagaattccttgttctactaatgaatttcatttcctgagtccctgtgtctgagtatactgtatgtttcaaatttctgatttagttatgtacctataggcaaatacactgaatggtcaacctaaaaatgcattgtttgactcatatttagagtcatacatatataggcacatgtatttaaaataaatactttaggctagatgtggtggctcacagctgtaatcccagcattttgggaggctgaggtgggaggatcccttgagcccaggaatttgagaccaccctaggcaacatagaaaggccctatctctacaaaaaaaaaaaaaaaaaaagatttttttaattagccaggcatgatggtgcgcgcctgtagtcgcagctactctggaggctgaggtgtgagtgtgaaccaggaagtcaaggctgcagtgagctgtgatggtgccactgcactccagcctggatgacaaagcaagacgctgttccaaaattaaaagttaaaaaatgagataaatacttgaaatattacaattattaaaatagttgttttccccatgggaaaaaaaagttgagcagagctgtgtctttgcactcagaaaaaactcttactctgttgaaggctagtgactcttctaaacaccaaccccttcacctttttactttccttagactttctttggaaaatcaaggagttagcactttttccccctggaagaattaaatgcctctccagaactgcagcacaggaggttaacttctaccacctttggaggcctgcaagctaccagattaaatacttaaagctaagcattcatcatttcttaacctgccctctacagtcatgcacttcctgctttttactttgtcagggctcgtactcaaactattcatagcttcatgaaacaggaactaaatgctgtctgagcctttccccttgtaactctcagcgttctgcttatccttcatagacagaagatgatgatatgtcctgactgttgaagagaaattagacttaatgtgatcctgtacagttaaaccaaaggccagatagggattttttatttcaatcaactttctattgtaggcctaggtttggaaaaccttagcaccccctaatttgtaagacttgaactgttttaaagataagggatacacagccaaagctttctttgtaattctgagatttttggtgtttttacagatacttagtctaaatctttcatcagacagttatcatgattattattctgacttcaacaactgcattttctaaagggaagtgagaattaggaaacattttcctgtacatctgtttatctatcccagttgtgttgtttggattttttcagtgtcttaacgattgaaaccatcttatccatactgaaattcatttcatgcttctatctgctgcttcacattcaggctatcagtttaattgagcaaaaaaaaaatgttggcagtttctatagcatcggcatccttctttggtttctcatttttgaatggttcagccacatgttaaattttgctgagatctctggaaacttcttcacataattctttgatagaacatgaattctgtgagactcttcattaaagagcacggtttcatcactaagttgagattttgctcaaggctatttggtaaattccagcagaagagcaataaatgttcaacaagaaacagccgtcattggagataacaagggtagacattaatgggaggtttgtcacaggtaaacaggtgatggcatgagaaggtttaaaccacctcataaataaatttttcgccactatatgatgtggattacaactaaaccaaactttaaccaatgtgggtgttggtgtacctttcttttctaaagcaaaaaagaaattgtggtactaaacttgagcttttatatgataccgctaattgcccttcacccaacaaaccaattatttctacccatcacttttcgttgcaaaagaaattatcttataaaatatatgtatatagcatatatctccaaagcaaatatgggacatctgtacctcaatgtaactgatagtaagttaaaaattatttgctgagttcttggtatgtggacagatgaatattataatgtttaaggcattccaccagcaggttttgaatttaaccaaaattttatgaagctaatcagaatggaattaaaagttgaaagactgccaggccaaaaagatcatctttcagaaaagtaaataattgctctatacttacatatttattatttatttgttcaccatccgtttatttttagttgagttctgtatacattggtgagcaaagggggactcattagcttgggcactcctaagggcaaacccaataacagatagtgaatgggaaggaaaatgagagaattagcatttagtgaacaaaatcttataaactatgctgaatggtatacatgctctttcagtaaagccactcagtactattacttccctaccttctgaatgtttaccaagttcgataaaatcttgctacatacaaatgggaagtatgtaacaagagatactagtggtttctgggtttaattaagttacatagaacattaagaagtatgttgggaaggcattagcttaaaagctgtcttttgccactgaggccatattcatcacccagattccctccacagtggagcactgctcagtcactgccttcagaatgcaaataggtcttcacaggatgctattaaaacccatagcaccgtatggttttacgctctgctttcttccagcaaacctacgtattttaatgttaatatatatgttcattttatctttgagaatgaaaatgtattatgaaaatataaatatttagtttttgtagacaaatagcacatttaaagatccagtagttattcacctgcctggtatgactgatagagaacagatgggtagcaaagaatcctcaccctggaaacatgtacgcatacacacgcaaacacaatctcgcataagctttaaggggttcattcattttgtgaaggttgaccatggataccagtttaaagatgccaggtgatgtttggcttttaagtatcatcaccttgagtttccttatataaatgttttaatatcaacaaaaaactcagaatttctaataggtcataacactgcctaggtatgggaagaggagagggtaaaattaaaagaaatgcaaatgtacttttctttgaataggctaaccagttagaggatgtatgaagcaggaccaccatagtccaagtatgaatatgcaaaattaaagcagattgctgtaaatctctcttaaaaagtcaagaatatgtcacagttggcatttttcggatgatcagaccgtttgacaaatctctgcaagggtccgagttagtcgaacatatcttttgcttatgatttcagcaacactgtgcgctttgccttctgggttgtattactaattctgttcatcattaagtgtacacatgtttcactgtttgactaaacaaagcttgaagacatacaagtccaaacattttctgtcctttctgtattcccaggtcagaagatcttagctctttatccattctgtgctagagtttgtctgaaagcatgaatcatggggttgtgttgggtgctaaatttcagttctatatgctgccttcactaatttatgactgtggtctgaacaaccaaaataaattatttctgagaactagcaaaataccctggaaaaaatttatgaaacctaccagatttgtaaaaaggtcagccaggcgtggtggctcatgcctgtaatcccagcactttgggaggccaaggcgggtggatcacctgaggtcgggagttcaagaccagccggaccaacatggagaaaccctgtctctactaaaaatacaaaattagctgggcatggtggcgcatgcctgtaatcccagctactcgggaggctgaggcaggagaatcgcttgaacccgggttgcagtgaggggagatcaccccattgtactccagcctgtataacaagagtgaaactccgtctcagaaaaaaaaaaaaaaaaaagaaaagaaaaaaggtcactaagtgatgagagaattaaaaccactcctattttctaccttttataacataaactcttgtctttacttcccaggtttgccatctttataacctgtaactaggagcaagtgatttaataaagggattcctcctattccgtctgcaaattggagttaatttttctcctctttctgcaatttctgttgttttagcttttgttagccataattagaaaatcaaaaggattcattgaaagttgagacaaaattgtgaagtaggaagatgtcttcctccgtaagaggagaaagattgttagaggaagtacatggaggctttggtgacacatccctatgaggaagtgatctgcttccacgggaaggagagaacagatgatagatgactcctagatgctcctgcgtcatgttcagtacaaaatcagagccgcatcagcaaaccggataccctgggaaggaacattgggataactccttggccataaacaaaagttttgctctggccttatgaactaagtggattaatagagattagttgttcaatatccttccatctaatggatccatattgttaaaacttaagaaacaccaaagggggagagtgtgagaatctactgccattttctccattgcttcattcaagacttctgtgtccaccttggcatgggattatcatttgcccttttatactcaccttaaactacaaagatcatttgtttgcctttctgaagaaaggaaggtggataaattttgcaggagactttaaaaattcagctcaactcctggcattaaagacaataaaggtggtgattcagaggtccccatggcagtttccccaaatattacgtttaactaagatcatctcaagcacagagagacttaactctctaaagtgtgatttttaaacctgcacacggaaattttctacattttatatgctcaagatttcttgaaatccagggtgtaaaactgtgaaaataatagttctgaacctatttatgaaagcaggagagaattgctttgttcagttttggaaaccaccagggtgcaatttaatgctccaggagagggttttctgtgacctggaaaggttggggtgattcccgtacagtgagtcatttacttccttcttggcaggattatgcccagggcttttaaacgctcttgacacttcactgccttccataagaaacgggtttagggcacaagtgtctattatgataagatgccagatttctagatcaagcataaagctgtggagtgggacaataggacttaataattttaatacacttcccacgtgaactgtcaagtaataagctacatattcagacgtgactggcattgagtcatcctgccattagtcaaatgtatgagacttttcccaagtcccagcaacaccaaatttgagaaatcgtataaaagaaaaatgaaaaagtaaatacgtctaagaaatggggaaatcaataaaaaatgtactagcaccaggggcggtggctcacgcctgtaatcccagcactttgggaggccgaggcaggtggatcacctgaggtcaggagtttgagaccagcctatccaacatagtgaaacccttctctactaaaaatacaaaaattaggtcggtgtgagggtgcacgcctgtaatcccagctgaactcaagaggctggggcaagagaattgcttgaacccaggaggtggaggttgcagtgagttgaggtggaggtgcaccactgcactccagcctgggcgacagagtgagactccatctccaaaaccgtgttagcttttatcaggaaaggccattaaattttcttcaatattacctacatcaatttgacatcaaactataagaacacaatatgtgagatgttttgaaattaatgaaatgaatcttctctttgagacgagtttgtgcacgctatgaagtccattaaatattttctgggaagagttcccagttaaaactactttctaaagtacccaagcacactatatagatacatcaagtaggtttattaatgtcagtatttcggtgaaaattgggaaggccactattctgagtagagaggtgtttgttttctacttgaagactatgaaggatattctgcactactgggcctatttctgaaattgtatctagctgcaagttactcattaatttaattaacaaatatttattagcaaccaaattgtggcaggaactgtgcctagaggtagaaatacattacgctcttgtttccagagaggaaaatgagtaatgttctaaaatgtaaatcttatgtttctctttcctcttgctgtaaatgatgtctaagccatttcggtggtgcctgttcttaatcctttaataaattattttgaatgattttttaaaaggcagtgtgattgtgaggtgagtttagtacaaattaaaaaatgtcacatcagttgcaaacagacagcacataattatgagctaaacactgtttcagaaacagtagtgacaataaataggattcggtataattagtcctcctgggacagatctcttcctctgttctttgccatatattttaataatgagattagccatctaatgccaatataaccagactgtagtattaatacacagaaaaattattgctagtaacagaagatttaaagacatgagggtgatccggattatatgcctgcaggttaaaaaaaaaaaatgtttcttaaactctctttatcaatatccttttcgtgagccactgaattcttttgtttttctgatcatatgaataacccgtcttaagtatgaatattgtgacaatagtaatagcaattactttaagagaatatgtttctatagagataacagaggggtttttccctaccattcctgtatgaaggtttctgtgtttttaattaaaattttaagaaattcatctttgtcttagcataataaaataaacctcactagacaatcaggacaccttgttattcttagatacattattatagctcaagaaataacaaatgttaagcctggaggatttgtattttggccaaaagttgtgagggcaattatttatttatttgagtgaaatatgcaggaatcatatatcaaaaggagggaggtcttttttttaacctcaacaaaaatataaaagtatagggaactgttatctatgtgaacccagcaaatctgagacaggtctcagttaatttagaaagtttattttgccctggttgaggatgcacctgtgacacggcctcaggaagtcctgatgacatgtgcccaaagtggttggggcacagcttagtgttatgcatttttagggagacatgaggcatcagtcaatacatataagaagtacattggtttggtctggaaaggcgagacagcttgaaacaaaaagcaggaagactcgaagtggggaggggccttctaggtcagagataggtgagatgaacagttgcattcttttgagtttctgattagcctctccagggtagacaatcagggtgattggctctaagcagttcccagctagacttttccctttagcttagtgatttgggggccccaagaattattttctttttacacctgtgttttttctttcttaactaaaaatagtatttgtttctgagggatagagataactaccattttatttggtatgatttatttgcctaccgtccaacaaagaaggtaatctgattttgttttcatttccaagcatgattcctagagatgtgtttaggtggccaaatcaatgaagcagaaccctgcaaattcatttattgggagatatcctaaggtcttcctgaattatctgatgttcccaggctttgcttatccaataggcattaggaagaaaaggcttgtgtttatgtagatgcacacaaaatgcgcatctcagcttacataaacagtgaaggggtttcccaggtctcattatccctggaggagctgaggcctggggagtcctcagagcctcctttgctactctgttattgtggcaggccaaatctcactaatgcaggcctccgtaacagctgtttccgtactgactgagtggttcagttaaatactaaaagctaaaaaaaagccagcgcccttatacagaggctggaatgtaacaaaagcccaccaagagttttgcctaggcctttcctggcaaaaccaaggaattcttaacaggacccatttaggattaacaagttttactgggagtctgaagaaactctacaggcctccaagaacaagtttactggaggtctgcaggaactcctcaaacctccctgatttagcaggagacaagataagagtaatcaccccagcacctagacccatttagattaagtaaatttactgagactccagaggaaggtcttcaggactcagaccttagttatggattaaagaagttaatcacttctgtcatgagatgaatgcacacttacacgtagacatacagcttagaaggcatataagttctggaaactttgtaattttgagttggtctggcactaatttccaggccatctccctgtaaaaggttacaaaaataaaaactctcttcctcccagttcatctgcatctcgttattgggctgtgaggtatagtagcccaaccctcagttcagtccgggaacattattatcaaactctggggattttcaggataagttaggaatatattttgaaggagaatggcagtattaaatgagatcagcaattgaaaacatgtgaatacattcaccatttaattacccatctcaatagaagataaggatgaatttagcactagaaaccatgaatgtcacaaaagcctaactttaataccttgaatcactttccagtaatcctaatcctttatccacatggatagaggacattcctatcttgctctttcttctccccacacattagcttaataattagctaaataatttcatgcattagctaaggaataatggaactccagaaacctaggacagtaattgagagactgaacaagctaaatctgaaccttctgcacaattaaaggagctgatgttagcatggcccacagaatattacctgcacttgtaaaaactagaaagtcaggcaagtactcctggaacagactgtcttttctaaccatgcacttatttctttgtttttaactttgtttttgtttgtttgtttttgagacggagtctcgtcctgtcgcccaggctgtagtgcagtggtggaatctcaggtcactgcaagctccgcctcccaggttcaaacaattctcctgcctcagcctcccgagtagctgggactacaggcgcccaccaccatgccttgctaatttttgtatttttagtagagatggggtttcaccatgttggccaggctggtctggaactcctgacctcgtgacctgcccgcctcggcctcccaaagtgctgggattacaggcgtgagccacggcgcctggcctgtttttaacttcgtaagttgctttgtagaactatcttaaacttggtctattttagattctccttgaagggccagatcacaaagtgattaggagaaggaggctctggagccaagacagtgagactaacccattcttcaaatctaacactaactagctgtgtaaccattgggccagggatgtagcctatgtaaccacaatctcctttgtgcttcatgcctcaccaataaggtggggagagctgctatgactctgtcatagggctgagacgaagatttgatgagttaccagcaaaaagcatttaatatactgtctcattcagaagcagtcaatacacattgaactcttattacttagaggaaagaaaggggtcgatgatttatagataaggcctgagtgaaagaaataaatgtgtattgagtatcagcaatggactacgcatcattctgggtaactatcactgaacacatttaatctgcaaatactatctgaaagatactgccatctgaattgcataggtgggaaaagtcaaggcttttgtgcttatttttaaatgtatgttaacatgaataattaattggccgtgcactggtcgcacgcctgtaatcctagcactttgggaggccaaggcgggcagatcacgaggtcaggagatggagaccatcctggctaacatggcgaaaccccgtctctactaaaaatacaaaaaaattagctgagcatggtggcacgtgcctgtagtcccagctactcaggagactgaggcaggagaatcacttgaacccaggaggcggaggttgcagtgagccaagatcacgccactgcactccagcctgggagacagggcgagattccatctcaaagaataataataataataattagtgggaatatatgctgtttgttgtgataggagaagaaaaggggagatccagatgttggtcatcagaaatgacctgcatcttctctaaattgaaatttagcttgaagtagtaatgccaaggccagcctggggccatggcatcctggtgtacctgcttgttggtgacagtccttttaggacaaaatatcttacaaaaacattcatagatgactaactggaaaaaaagaagttatgatgaaaagcaattcttactgtttttgttttttgttttttgttttttttaattaaaagacaggcagttattctctttcccaggcttgagtacagtcgtgcaatcagggctcactacagcctcaacctcctgggttcaaataatcctcctgaccaagcttcccaagtagctggaactgcaggcatgtgtcactgcacctagctaatttttaaaattttcttgtagagacaggttcttgtaatgttgtccaggctggtctcaaactcttggctgcaagtgatcctcctgcctcagactcccaaagcaatccttacttttttaattgaagtgctttttttttttcttatttaaactcttaaaaattcatcccattttcttcaaaacaataaatcctttacaagggagaaaaatgaaatagagcaactaagaaagcatccatgaaggccaggaaggaacatcatggttaaatgcgattagtcacagccccttctgtctccagtcttggatgaataatggtaacagaactagagagatttctaagaccttggtgcttaataacaagcaagcatcgagggtggttgtgcaagatcctgatcacacaactctgcatatcaaatatccttcacaatcaacaagagtcagcctttaatctctgatgttttcaaatgttctttttttttaattcacatgtataacctatcctcttttcaatatatagagatatagcttatcagtcattacctcttttactacttttcttctgagatttaaaaggtcatcctctgatttgtaaattcaaccagatttcacagttcagatgagagttgtaataagttgccaagaactgttgcaagctgtgatggctgtctttctggggattatagagaagcacatttcttttaggaaaaaagaaggcagatgagcccaagttgttttatttttattgtgtatatgtatttgttttctcaagtacagtagcatggcctctgtggcaggcattcaccaagcaaatacagagcaccctctgggtcaagcactgtgttattggggttccaaataaagaaaaaagaccaaatccagccctgtggatctcacattaaagaggggagtaagaatcatagataatttaatgagttaggtacattaatggggatttgcacagtatttcataggagcacagaaaaagggtacctcgttccacctgagatggcagggagatggctcctaagttaactaagcaaaaggggaaggagaggcacatcccataggatatggataacacaacaaaagctccattaccacccgccccaccaccacacacaccatctctggaataaattttgtaccttccaactggttttcagggtactcatgacacatgggttaataatagctaggtttgcccaaatgaccaaaattctattcccaacatgaattttcacaactggtttttttgtttgtttgttttaatgaagaagaaatgttgtgtttttggaaatcatcttacaaaatcatgtagtggaatgcatatagtgatgaaattgttgaagaccagggaatctttgtccttagtttttattaggatggatgttttcaggtaaaactaaaataaaaatgaaatggaaccaattagaaagaaaataggagcacttaagacgaaatgtaattgttgctgaaagaattagaatctgatagcttagaaagaacttaattaaatttcagagtaaaataaatacagtttagcaatggcctttctcctagaaaaatataatgtctcttacagttcagttactccttggcttacaaaatagtggttaaatttcctgtttttctcattttgatttcgtatgttacatgttactggtgatgggattatctgtgtgacattacctctggtcttcaaaatgtacacgtagcaatgtagtctcacatatgccccttgggtgcgaaaagagaaggacctaacttaacctgacagacctcaaatctgttctctttctatagcagagtactcctatttaaaaagaaaatgttgagtaaggaggacagtcatcatatatgtcgagaatgttaaatgctcttgtggaagtgaaaagcagccgatctaagtaattacccattaagaaaggagtaggagaaatgtttagaaggcagacctgcaaaaaggtgactcacagtacgttcacatgaccggatgcattagtggaacctctaacccatcgccaatggaagaagcagtgttttgcacaaacttgaaaaagagtttttcattttcctcccacagcctcgtcacgtgttcaatatgctaaagaagtatgtccgcgcagaacagaaggacagacagcacaccctaaagcatttcgagcatgtgcgcatggtggatcccaagaaagccgctcagatccggtcccaggtaagcgtggggtataatcatcttctgcagctttgacaatccaggattcttgcttcttgggttggtgacaggatcccacgcattctccgagcacctataggtgttttccctatggcaagagctctttaacttctggtaaattctaaaagcttgtcttagagcaatatgtggtttggcattttctgagttatgaaaataacaaatgtaaaaatcttagtctactgctaactgattgctaaggaactgattaaaaccaatgactaaaatgagaaaaacaaaagttgtataaactaaaatcttgaaaactggttcaactgaagtatggcaggcaatcataaacctactggaatgttgagatttcatgtgagcctaaatgaagcccagtaataatgtattttatactccccggttcccaaaggctgaaaactgggatctaccttaggaaatgtgaaattttacattttcttgaatgaaagagttaaatatatatagcatgaaatagccaatcaaattgaaatacgttgttttctagggggaaatttgcaaagaaatgtatttaggcatgagggtcctgttaagagagcctcagtattaggaatcagaggtggcagaggtagcctttttaattggctgttataagcatacaagataatggtaagtttcaagatcaagtcttaaacctgagctcaaaaagttagagaacagaaataggagaacaagaaaaataaagttgccctttcagttcaacctttttaacagtagcagtgttttgtcagttttcttttggaagtttgtatctacctgcagtgcttggtaagaaaaataacctgggcgacagagcgagactccgtctcaaaaaaaaaagaaaaaaagaaagaaaaagaaccattcctacccccagacattgttgacctggagttgtcatcctttgatgcaggttatgacacacctccgtgtgatttatgagcgcatgaatcagtctctctccctgctctacaacgtgcctgcagtggccgaggagattcaggatgaagttggtaagtaagctgttcttttgatgctgcacatggacatgtattttcccccagaggaaaattgaggaagtgagttatctgtttgaggaatatggaagttaatagaacagcttgccttttacgatgaaactgtcaggctggaactagcttactagccttagcaattgaatcagttcttacctctccatacttgtaagactggaggaatgtcgcctgacttagggtatagttttgtaataattggacacttgttattgaattatacgtggcagcattttttctaatttgcccaatcttgttatggctctcaaattatgatgctttggtactttacaattaatggggaaaaaaactcattcttcatcttttgagtgtcacgattgttccatcttacaaatgaaaaagctcaaacttaaaatttgagtaacttactggcctgtgtcacatgcattataagtagcacagccaaaacacataactgtgacttgtgactttgaggttattgttatattcagtaagtcacaattctctttgatggctgagcagggaagccatgagtgttctctgaaccacatcattgtttaaacttaaaagatagtgggctattaaacttatattctgaaataattgtactctcacaagaacttggaaaaatagtacagagaggtctcatgcatccatcacccacatgcctcaccagtgacatcttacgtaactatagtccattatcaaaaccaggaaactgaccttgtgtgcccactgtcttttatgtccctagttttcctaatgactaatgatttcatttaagatctctcatttctgtttctcttggaaagagaataaaataccacatgagtctctgtcagctgccaaaatgcccataactgtttaacttacttcacaaaggtacatagatgacgattatgttggtgcatctttcaatataagcatatgtacctatactggagatttagtgtgtagtctaccaacatataagcaatatgtatctggcatatccttccccataaagaatcctaccctttgttaattgggttggaaatagatacaggttatcatctggaatcagagcacccaggatgttgtagatggatgtacccattacagtaagtccgactttgaagtgcctgaaacaccgctcaagggaacagctggccctcactttttcccattttatgccagtgttattctgctcattctttcctgatttatgtggccttgtaaatattgtttgtattgctgtgaaatatttggcatgtgtcaagtgatgatgttctgttcagtactgcacattaatggacggaatctgaaattatactttgagctacataacttgcagaagaaacttcatatgtcagggaggtgcagtgtcccagaactttgggaggccaaggtgagcagatcacctgaggccaggagttcgaaaccagcctggccaacatggtgaaaccccctctctaatttaaaaaagaagagaaaaaaagcaacttcatagtgtgccaagcttttgttcagaaggagcaactcagtgttgagcaagaatttatgaagatagtggaggtggagtttttagtctacaccatgaattgagaacagagatctccaattaatttttcactgtatcaagtttctttagcaaacaaatatacttttcaggtatacttggagaatagacatcagtaaggaacctttaaaatactatgtattaaataagtgtaaagaagttctccaaaaagttgtagaaggtacaaaatgaaataatttatcagtcttaatgaactgaagctaaaatcttctagaaaacatggtttgtttgtttgtttgtttgttttttacagctatcttaagcctgttttcacatgtgacttcagttgaagtggcataggtaataactatagggaaataagccattacaaaggactaaaaagttgatgaccaatattccaccctcacccagcaattattgttgactctttataattaaattattagaactttttatttggcactatactactgaaaacattagccactaattagtcacacttccacagaacagatggtggttcagatatcttgaatattacgaaatgcccaagaatagggcagcacaataaacttcaaatctcagtaccagggaggatatttagataactagtatcatggaatctttttctgtaaaaagaaaaaaaaaaacagccattaggttggattaagaacatattagggggtgcagcacaccaacatggcacatgtatacatatgtaacagacctgcacgttgtgcacatgtaccctcaaacttaaagtataataaaaataaagaacatattacgtatgtgctcttaatgtgtgtgtgtgtgtgtgtgtgtgtgtgtgtgtgtatgtatgtaatatgctctcaatccacccattagttgggtttttttaagtaatgacatatatatcattctaaatataccagatgccacattctgaaagataatcttttttaaaaacctttcatttggaatcctgggtgcttccatttttaaatgactgttctctatagaaagagaagtttgcaataacgaaccctgtacactatctgagctgctagtgtcaaagctacagaagtggtttgctggggagaatagcttttctgggttgaacctagttgtcatctatagtcctttttcatttgaaggaacatttaaaacaatacgtccctttttagtaggaatatagttgaaacttcaagattggccaggggtgctaattgcttaagccaaatgttattagaggttcctcatgttattctttttacttttgtatgtgtttaaaatttctcataataaaaagtgttgcttttagcttactttctaaataggttcttcatagattttttttccaggttatgtcttgtagtcgttctaatattctctgattaaatgctttgtcattagtctgagttgcatttatttgctatttctgtatataatcaaattttagatttggagtcagttcagtacaaatagcatactaaaattcagagacactggcaaaaggagaaaattttaaagtccctaaaaatgcatgccttttgtatagaagtttgtgcttataaatacaagcaattaggatgtgcttaatgcagtcaaacatctgtagagagatacaatggtttaattaaataatggtaacagttgctttatggataagaggttttcaccagtctggggaactgccagtatctttagtgggagaggtatatctgcttcagtaaattatgcttccaattagaattctcttttatgggtgaaaatgaggaagaatggagtcatgctgagaagaaggaatgctatcggtgaaggggaaaattgacattaaatttgtgagcagtaaactgtgaccagagcatagggttcatcatgcttgtgagttctggccctggccttgtatcttccattgtgcttccctgaggcatcctgtctgttcatgctactttcccactaacttcagtgaatcccaaattcatgggtctagccacagccagcgtactgaatcccagtgccatattccagaccccaaatatcccatgtgcctctgaacctgcaatcaatgtgtataacactcatgtccttctggaaatttacttgttttacacactctattctgagttctcttggttggcctaaactatccatgatgccttcctctccctcacccattatttcttattagttgcaagttctgtatatttggccttctgtgttcatgtgaaatctctgcacatcccctacttacctgagatcctgtcctctcatcagtgtcattagactcccagccagtcaccctacctcttatctcacattggccccctcccacttcaattcctccttttcggaactatgcaagttcccttaaaaacaaaagacaaaacaaaaaaaacagctgcaggccggcggcagtggatcacctgaggtcaggagttcaagaccagcgtggccaacatggtgaaaccccatctctactaaaaatagaaagattagccaggcatggtggcaggcacctgtaattcccagttactcaggaggctgaggcaggagaatcacttgaactcgggaggcagaggttgcagtgagccaagattgcactattgcactccagcctgggcgtcaagagcaaaactccgtctccaaaaaaaaaaaaaaagaaaaaaaaaaagctgcttgtggtttttccttgcttgaaaagttgcacctttcaagattcaagtaaaatgcccaagtcctataaaccctttctaatttgcatagagaacggagaaaagagctggcatttgagtgacaaccatgtaaccaactaatgagtgcctctttgtgataatgctgatggtcacattctttctttatgaatgttccccgttgaggtacaggaccgccatatagagatgtggcagtggcaggtggtttagggtaagagtggagactgataattttattctacatcccactcaaggagccaagccctctggcattgtgcacacccactggaagtgggctgttcttgcatttcacacaaaggcagcatatgggctagtgaagatactcggaaattcagtgatagcatccccagtttacagttgaagaaattgaactttgaacctaagagagtttgccaacttgcccagcccagatagtaaagtgatgaaagtggggtggaagccaagacctgccagaagtccaaaatctgtgttctttctgctgcctattttcctctctgaagtggaattttcccctacttaacctcaatgtgaaagcactgggtatccacctccaataccatactctaacttggagtaaattatttgtttatatctctactaaccctccatcctgtgaactcttccagatatatgttggtcatccttgcctcctcaagatccagcaaggaccctggtactttttagatattagtaattataaatataaggttgaagccagtccccaggataaaaaggcagatgctccttaacttggactgatgaagtgggctcctccgtaaccctaaagacctgaccaaaactccttccttgacatctagcgtaagcaccacacaaaacaaatttctttcctaggccacagcatcctctaaagctgtgattgatcaagctaactaaatggatgtggttggccaagataacaaagcataaatcagggttctgaggacctttattaataaaattttacaacatggtccttctttgtaccatgaccctctgctatttggtcatctacttgatttaattgtgctgtcctgtttgaccgccaaccacagtctgaagctattcccatgacaaataagtgtgaattttcaagtgtcctgttgtgttataaaaggcccgtgttttattttataatttcatatttttttcattcaattttaattattatgtgcaagttcccaggctcagtcatttattaatgtttttattttttaaaaagttattttcaggcagattatgaagatttcttgcaaagaatggcctcaggcattgtttgtatagagataaaatctcctcttttaaatcactatgtaggtcttcattaatattttttcattcaacaaacgatggaatcattatttcagtgaaactatggctcctcttcagtgttcatattctgctttaattatttattaatccttcaaaagggcagaatcccttcatcctttcaacctttgctttgtcaaattgttacttaaaaatgattggtgttttctttgtcctttgtaatcttccttaaatctctgctaaaaggattctattctactctttgtattggcactgaggttatttatcaaagtgtgcttctctttgcagctacctcaaggctaaaaatgtagctcttttcagagatggctgttttacagaatgctataataaccaatttatgagaaaggcagtaggaaataaagagggaacaaaggcataattgtttcatacccattttttttcttctagcattcaaaattaataaaaacatgaattattataaaccagatgcgggaaagatctctggctgaataaatccatagtgaatggggcaggattgaaagatatggcggggaatcaagaaattcgcaataatgaaaggatgcttattttttattacaattttactgtggcctcttgataaaatgttccactcttcaggaaaaatgcagcatggttatttcaaagacagtgtttccatattctgtttctaataagcctgttgatttgggggtttagtgggtccaaagtagactaggtttaaaatagaatatttatagcacttcccagcccaacaaaatagaaatttaatgttattgagaatttcaagtatccttatgtgtaattgttagtcaaggatgaacatcaaaaaaaaaaaatcataacagcaaatagagagctgtcactttgttcttataagaacataggtgtgactttgtttttcataagaaatgacttttaaatgtatatagatttaatggtttacagctgacttaagtatttggacataagaactttttttttttttttttttttgagatggagtcttgctcagtcacccaggctggagtgcagtggcgtgatctcggctcactgcaacctccgcctcccgggttcaagtgattctcctgcctcagcctcccaagtagctgagactacagacgtgtgccaccacacctggctaatttttttgtatttttagtagagacagggtttcaccatgttggccaagctggtctcgaactcctgatctcaggtggtctgcccatcttggccccccaaaatgctgggaatacaggcgtgagcccccacatctggccaagaacatttatacatattatcaacaaccaaagccttgttcccccattggtttcataatagtctcagagctccttattcatattttccctagtgttattaagtaacagacatgaggcctgtaagtttagctgcctgtgtctaaatgtatatctttgacccaagacaatttctctttcaaaatagaaccactcatttataaatgaaaatgctttgtcaaatgaatggcaaagtacggtatactattaagacagcctcctagttttctgacatttggactgccatgttgaaatgtctccacacagcaagatacaaatgtgtgaatgccagtacacttcataccttaggtccccaactggtctgtctgcagacttgaggttacagacctgcaggtgtcgaactcaccccatagtggtggttagtagagtgctttgtatacgtttagctctctatgccttttttggttgtgatattaggtaagctctctttttcttgctttggagcttaattatggaatctgtaaatatagtgcatatgtcatccagatgatctgtggaagtcattgataatgacctttaaaaattcacatgtaatacagcatccgttttcctgaatgatttttatagttttaccattggcaaacagatactttcttttatgtatttctactccataattttaggaaaaagtaaatccttttagctacattaaaaagaatacactttctaggaataatgaatgtaaaaaaagtttccttttttaaaaaaatattgcgctctctaccattctggcagacaaattgttgaccttaatatgtataattcagtgcagtatattgatcttgtttattgtgctccaaatggacgctggcagaaatttgaggaattaaatatcaaccacagtgttttcttcatgcgattgcaatggtttgttatggattattttgttcagttcaaataaatgatgtacgttcagattctttgcccaattttttaattgggttgtttaccttactttcttaattttatttttatttttatttttatttttatttttggagacagagtcccgctctgtcacccgggctgaagtgaagcggcatgatctcagttcactgcaacctccgccttacggattcaagcgattctcgtgcctcagcctccccagtagttgggattacaggcacatgccaccacatccagctaatttttgtatttttagtagagacagggttttaccatgtttcccaggctggtctcaaactcctgagctcaggcaacctgcccacctcggccttccaaagtgctaggattacaggcgtgagccactgcactcggcctgctgttattattgagttgtaagaatttttatatattctggatactattaaattcttatcaaatacattatttggaaatattttacccattctgtaggttgtattttcacttccttaataggatccttttgacacacaaaaattttcaatttagaagtctattttatcagttttttcttttgtggcagttactatggtatggtatctaggaaaccattgtccgaaacaaggttacaacgatttatacctgttaccttctaagagttttgtagttttagctcttacagttaaatctttgattcattttaattttcatatatggtgtgaggtagaggtttgactttattcttttgcatataaatatccagtgtcccagcaccatttgttgaaaaagactattcttgccaggtgcagtggctcatgcctgtaattccagcattttgggaggccaaggtgggcagatgacttgagcccagaagttcaagaccagaatgggaaacatggcaagaccacatttctacaaaaaaattatccaggcatgataacatctatttgtagtcccagctactcaggaggctgtggtgggaggatctcctgagcctggggtggctgaggctgcagtgagccttgatcacgccacctgggcaatagagcaagaccctgtctcaaaaaaaggaagaaaaagactattatttcccccattgaatggtcttggcactattacacaaaatcaattgtccatagataatatgggtttatttcttaattcttagttcttttctttgatctgtgtgcctgtgcttactgtagtaccacactgttttgattattgtagctttgtagtaaattttgaaatcagcaagtgtgagtccgttatctttgttcttctttttcaatattactttgagtatccggagtctcttgcattacaacatgaattttaagatcttcctcaccccctgcccccactaccatttctgcaaaaaaaaaaaaaaaaaaaaaagtgcggattgcattggatctgtagatcattttggggaatatttatatataatgttaatgaggttttaaacaacacttttatctactagaactgatatttgcctcgaaatgattccaccttgagccccattcaggaacgttagtattttagaagtagcaagagaactgatttagcatgctatcatcttttactccaaattttggtgagattccagagaaattatttgtgagcttttccttaagccatgatgactgacatgtcagtagtttttgtctgtttttatgccattcttttatttttgtgcatgtgtgggcacctcaaccaaatggatggagcctgaggcatggtctcccacgccaaagtctgccgtttcttttgatgatccaatgcagttccaaagctattttctcaactcaccagctcgtttgtatggccctgtaatttgaaacaaaatctaaaaagaaatccaaattaaaatgattgggaagtgaagtcagaccacagtggtggctgtggaactacttcctggcatggaacactagagcagatgtgtcctgctttttttgtagagtcttgggaacaaccaatgattttagactggaacaagggctggttattctgtttttcacaagcatctgccttcaaggttcattttttaaaagaggaggggaaaaaaatcagtgatgtttgccaccctgagtatggagatgaatccaaattgagattaattttgaaatatgtttcccgaattttgagattaattttgaaatatgtttccacaaacactaactgggaatgacatgagtttgtttcatgtgagacggagtttggaagacatgttaatttgcttgttggtgttcaactcagaaacaaattttgcatgtattttctgagtaagtgccattattagttaacagttttcctgccgtatgcactatgggctgctttagaaagtaaatcatagaaggttagttataatatctcatcaaaaatagtggatccatctattaaccggttccaagttatgagacgtgtccaaaggaatgttgacttggtgtgcacctaaacactatttgtgaagaggctttggacttcgagcatgaaacggggtcagagggtcaaggccagggcgttacttaatttcagctcctgttgatggattcattgacttcagatagtgcgtttaaaaaagcctgtttaatgtgtttgtcttttgataattattatgtatttacatatgctcctaaaagcatgagttaaatcttatttctttgaaacagtgcttggcaacaacttgtattgtcttgtacatgccttttgtgtctttgcttttggttgggggggggcattgaaatttgtctgcccatcccctgagggcagatactgaggtgtggacctatgtcttcagcttcctgtatagcattgaagttgctatagctgcatgttctctaaaatttttatacatgcgatttaattgttaaagcttatgatttttaagtatagtattctgatagcaaatagattttgtcaaataaaaactaactttatcatcaccactgagatatcactaggtatatggcttagttctcagtcaccacttttatttgtaaggaagtcttagaagttttcacaagtgtatatgtgatagactgggcacagtggctcacgcctgtaatcccagcactttgggaggccgagtcaggcaggagttcgagaccagcctggccaacatggcaaaaccctgtctctactaaaaataaaaaaattagccgggcatggtggcacatgcctgtaatcccagctactcgggaggctgaggttggagaattgaacctaggaggcagaggctgtagtgagctgagatcctgccacttcaccctagccagggcaacagaacgagactccatctcaaaagagaaaaaaaaaaaaaagctgggtgcggtgctcacgcctgtaatcccagcactttgggaggccgaggtgggcagatcacctgaggtcaggagttcgagatcagcctcaacatggagaaaccccgtctctactaaaaatacaaaattatccaggcgtggtggtgcatgcctgtaatcccagctacttaggaggctgaggcaggagaattgcttgaacctgggaggcagaggttgtggtgagctgagatcgcgccattgcagtccagcctgggcaacaagagcgaaactccatctcaaaaaaaaagaagtatatatatgatgcttgctttagcagcacatatactaaaattagaatgattaaagagattaacctggcccctgcacaaggatgacatgcaaattttgtaaagtgttttatatggaactttacttacatgaggtacctagggtagtaaattcatagatacagaaagtagaatgctgattgccaggggctgagaggatgagggactgtggagttagtgtttaaagggcacagaggttcaatttggcaatattgaaaatagttcagtggggaagatggatggccgtgatgcatcgtccatcacattgcacagcatcgtgaaatatacttaataccctgagcgttacacttaaaatggttaaaacagtaagatttatgttatatatatttaccatgataggatatatatatgtatattcatatcattcgccattgtgaatagcaaggagattgaagaaataaggacacaggatcttcaataaatatgtattaaatgcttcccatgttccacattctttgtcattgccagacacgtcacaggtataagggcccaatctttgttactcaaataatttagaataatttagaatttgcttggggagactttggataaacagttaagaagctgtatccattaggtaaagggacattgcttgctgcgtctcgtagcatttggtagtctcgttagacagccgttcttactcctatcgtttgctgaaatttattagcaaaggaaagaatcttagttttcagctcgttcagccgcatgatttcataggctcaggaaaaccatgtaatatgcccaaggtcagacgtgatgaataagactaaagactgaatctattccagtgtctctgtgtccagtgatacttacttactgctgttgccaagttaaacaaaactgggtttgcagagctgtttattcaccttcagcatcttttcattgaaaatgcggtagatagaagaaatgtccctcttttagcatttgtacctcagtaataagatgcttcccaagctcaaagactccacacccttaaatatgtaagtcagtgttaagatatttaaagagaacatgaatatcagctacattgtgcatgttgcaggatttttatattattttgtatcttctgcttagaagtcataagccagcccatgaaccatgccaacaaacataccttcttccatgtgattattgcagccagatttttcagtgcaggacaagcaaagttttctctgaaagcatgagataataattctcagccaggtcttcgccatttgcaagggatcagacataagagtttttagctctgttgatgttaatagctagagcccctgttagcagatggcatgttagtggcctgttgctgctggctattaaatcatacacattggccaggcacggtcggtcacaccagtaatcccagcactttgggaggctgaggcgcacagatcacaaggtcaggagtttgagagcagcctgaccaacatggtgaaaccccatctctactaaaaataaaaaactaggcaggcatggcggcacatgcctataatcccagctactcaggaggctgaagcaggagaatcacttgagcccgggaggcgaaggttgcagtgagccgagatcacgccactgcactccagcctgggcgacagagcgagactccgtctcaaaaataaataaataaaaatattaaaagtaaatgatacacatcatgagatcatctcccaaggcagcagagaattttgcgtatttttttcttagtttatattgttgcaacagagtaattcttcttgatcacagactttgctttttttgttgttattgtttctaagtttcacttgatcctcaaaataacctgagacagacaaaacagataggttttcccattaatctccttcatgagtctgactttgccagccaggctgatcttatatccatagccctggatgcatttatttatgttattccatctgcctataatgcccatccccaatcttggcctattacatgtgtctaacattactttgatgtgtacatgtcagtgaattaccacttaactgattgttagctttttgagagtatgtatcaaatctcatgtgcatttgtgtgtcctgaaacaaattattaggtataaagtatgtattgcaaataccatgcccagggaatatttcagagctgtggttctccaagtgtggtccttagtctagcaacatcagcatcgcctggcatcacctgggaacttgttggaaaagcacattccatgatcccacccctgacctcctgaatcagcaaagctagggatggggctgagcaatctgtattttatcaagctgtccaggtgacattgataaatgctaaactttgcgaattactgatttagagactaatcaactcattaaaaagttaataaataggtgagaatccattgtagcaccccagtcacctatgctattatcttctaaattcacattatacaaattgtatgccacaaaaatgtttaaggtgaaaacccaaaggaattgatgcattggattaattcacaaaaatttaacagctgcaattcatagaaaaaaaatgcatgcatatctgataattagttgtagattaaaaggtgaacaacttcttattattaataccaatgaaaatgtaattttttaaaaattatggccaattggtagttttttaaaaatctgttatgccttgtcatgataaggataggtgaaaaggaactttcataaactattgctaagtatatgggtgaaaccttttagactatttgggtctacctaataaattaaaatgttcagtcttttctaattttagcaccgtatttctacagatacactggcatatctgtggagaggggcacttctgcttgtcacctgatatcccttactactactaatatttttataagcattattacctttaaaatcatgttaaagggtaaatgatgtgcaacagactcagtttccccttctctgactcctgtttagtttacatctcttttctctctctcatttgggggctcaatacccttaagattatagagaaattgcagtaggtaatgttggctggaaatgctaacttgtaagaaacttgggtggaaatggtttaagccatcagcctaaacgatcagtgaaaatgtcagacattctccgctttcttcttccaagatactatactctactgtggccttagagttcttaattcctatataattctgattaaaaaggaaggagatgctcctaatataccttgctgttgtcccctcctgttcattagggtagctgatgtcagtcaaaataaagtctagaaattcttgagtactttttttttttgtaatatactgagaatgcttgaagcaaactaaccaaatttaagtgttttaaggatattaacagtaacaggagagcccctcgattttctgctaagaatcaacctgaacagtttccagactgctggttggcaatgtcagtatcatgagaaaaactgaaaaaataagaaactttagagaaaaagaggaatcagtgcaggctaggggaatgaacttggtaatccagtagtctttccctgccagcattttgattgataagctaagtgtctgctttttctcatcccttattttttggcaggaaaccagtattttgatacttgaatgccttctttctatcttaagggagaagccttcttaaacttcaagtgtgaagtagatcctttaggtataggatgaaaaattaagtgggactatttgtgaattactaaatcgcaaccattaaagaaactaatgccctaattagcctgtcttttgacagacatggcatccatatgtaagtctaatattgtatgcaaatgtgagacaggttttgctttctagatctctttgatgtgaaaggaaaagctggcttcctggcttccttcccatgttctgtatggacctgccttcatcctgctgccaacagctcctcaagggaacatgaaagtggaattaaaccctcctggttttcagattcagaatcctgggtgattaagtggcttgatcaaaatcagaaactgtgaaagtgctaaaaatggtcaaggcccaaggagttcctcatgtgtggtcaaaagcctttcagaaatcaaagtgtgtctttaaatacctggggtgcaaaaatcagatgttttttatttaaagaaaaataggtatattagagcagaactgggggccctctgtaggagcctgagtctgggtgtttactgtcgtctaaggccttgttaatgtgggcttgaggcttcggaatccacgaacaggggaagctagcgtctctcgctgactccagtcctagctcgagctttccatactgccctacgtgacttctgcacttttgtgccatcagccagtagactgagaaaagtatctggtatttgtcggtgtcttcggtttagctgctttaagtccttggatggaaaaggctgattgtcatcctgaaatcattgtctcctaatgtgtaattggggccaagtgaagcacagtaatttagaggaattctagttaaaaatacagattcttgggctctacctcagacctacagagatctgcatttttcttattcccccaggtgatcctttaaacattcagaggtttttaaaactcatgcttatatgcaataacaaaaatataaggattcttagaaacttgttatatttgtcttgaacatgggatgacagacattgtcattttcattgaaaaaaaaaatgaagcagagactcagaatgtatttagagacaactctaaatacattctggcagagcctaactactggattgcagagatcctccctgcttcccccagtccccatctataaactggccatgtgaatttctagtggtgttcacttccaaagtggtgattttataaaatattacaatgaagcattattaacctcaagaagttcagatgcatagagagtttatttgggtgtggcagcattagtggctaggttttatttatccaagataagacttcttattagctatgaaaagggattggcataaactgcttattaatgtccattaactgtatctaaagggaataaacagtataaaaggccaggcatggtggctcacacctgtaatcctagccctatgggaggctgaggcaggaggatcatttgagcccaggagtttaagaccagcctgggcaacatggggagaccctgtttctacaaaaagtcaaaaaaataataagctgggtttaggggtacacacctgtaatcccagctagtcaggaggctgtggttggaggatcacttgagcccaggagttggaggttgcagtgaggcctggcggcaccactacactccaggctgggtgacagagggacgaccttatctcaaaacaaacaaaaacaaaaaactgtataagcataagatgggcttgagtcacaaaattctgcctttcataactttcccccatttgctgtttgatttgctgtttcagaaattgtgaacctacttctctacttatagaacatttacctccctcttagattcttccctttctatcattgatactgacattctgcttaaagaattatccatttaggctctcttcaaatccaaagtgatattattttattttaataagagatgaaagggaaaattgacaaaatgtgcctggagttgtcagcattgtaaatgatggactgtaaaagcttcgtcttggaagattgtcagagagcctagtgccagctcaaaaagtgtggtctttttagagaattgacagaaatgttacaaagaaaacatgtgctgaataccaactccaggtgcgaatcctgagaagcaactcactctattctgcagtaggagatgaattttgcaggttatacagcagagcaatttaaactcccttgtttcttaaagtatatcctatagtgacttgggatggaagtcatatactatccccttttttgttccttcaaagtaaatacaccacagagctggagatgtcccagacacagggggaagctgtttggatttttcccactgcctgtaatgaagcaagatagggaggaagaacttgggaacttgcgtggcaaatggtcaagtaaagaaaaagaaaagctttttctttacttgaccatttgtcacatgtgctttcaaatcctgaactgagtcacatctgaaataaatcacttccttgtcatttccatgaaaggggcagtacaagaaattccttgcacatccctggtgagccccttgttactctcagattcagctattgccttcaggaaaaaaagaaaaagaagccgaagaaagaaagaaaacagaatcctctagaaaaagctattctgacctgtgctctttcttttgtctgagtgtgactagataaatgcattagtctgctagggctgccataacaaaataccaaaataccacagactgaatccttcaacaacagaaattatttttctcatgcttctggaggctggaagtccaagatcaaggtaccagcaggtcggtttctgaggaggcctctcttccttgatttacaaatggccacctacgcatcatgtcctcacatggtctttctcagagagaaagagaggtgtctcttcctcttcttcttttgttttgttgagacagagtttcgctcttgttgcccaggctggagtgcaatggcacgatcttggctcactgcaacctccacctcctgggttcaagcgattctcgtgcctcagcctcccgagtagctgagattacaggcatgcctggctaattttgtatttttagtagagacagggtttctccatgttggtcaggctggtctcgaactctcgacctcaggtgatccacctgccttgccctcccaaagttctgggattacaggcgtgagccccgcacccggcctcctccttttcttataaggacacctgtcctattggatcagagtcacacccccatgacctcatttaaccttaattatctctttaaaggtctgatctccaaaggtcccttgagggttagggctttgatacatgaattttcaggggcacacagttcgatccatagcagttggcttattcatactttgggtagatcctcttcatcgttcctcagctactgtctatttagtgcacagcttctttatcctaaagctagtcaggggaggcatggaaggtattatttctcctgtttctgcacctaaggcattaaaacgaggttgtggtctggcagcctaaactcggccttgatgaacttcaaatcctagacctccttggtatgtgaagtgcatacacttgtatggagggatttgacaggttttttttttttttttttttttgagacagagtctcactctgttgcccaggctggaatgcagtggcacgatctcggctcactacagcctccgcctcccggtttcaaatgattctcctgcctcagcctcctgagtagctgggattataggcgcgcaccaccacacccagctaatttttgtatttttagtagagacggggtttcagtatgttgatcgggctggtctcgaattcctgaccttgtaatccactcgcctcggcctcgcaaagtgttgggattacaggtgtgagccaccgcgcccagcccagatttttttaaattagtttttagtgtatccacactgttaaagcaggtggatactgctggatagtataacaaagtatagtgtgacaaacccataaccaagcattgttagctatattttctcatgtcttgagccaaaaggtcacagttaacctaatgttgctactaaacactcataccataaaacattctattccagtcttccagattttacacaagaataaaatgaaaacttttagactactggagatttttttttaaatacacaatttgttgaatgtgaacgctaaattgaaattgacatgctaagttttatagattacttcagctgccctgacttcagtaaatttagttgtgacacaggtacaacagctgacttctttctggcattagaggtggtgatgtttcgtcactctggagttagtaaaacctgaaacccgccaggcatttgacacacagtttgctgccagggacagctcagcttctggcttattggagaggaaatgacctaacctctgtgtttacaaagtgtttgaaactgaggcccttccacttccttgctgagtgtaagggttgacctggcatccaaaatccccatgatcttctcaggataagtcatgcagccattggtggtcaagaaaggatttgttccctgtggaagggcattggaagaggaacagagctgaaacacacgggtgttcagagggaaaacatctctgcacttaagagggctagattagactattagactattatcatagagctcgtgattcatctcctttgtttaattccagccttgagtaaaggactcactaagaaaccacattcggccgggtgttgtggctcacgcctgtaatcccaacactttgggagaccgaggcagatggatcacaaggtcaggagttcaagaccagcctggccaatatggtgaaaccccgtctcaactaaaaatacaaaaattagtcggggatggttgcgggcgcctgtagtctcagctactcgggaggctgaggcaggagaattgcttgaacctgggaggaagaggttacagtgagccgagatcacgctactgcattccagcctggtgactggagcgagactccatctcaaaaaaaaagaaaccacattctattccagtatatttattataaccagaaattcttgtcttatcagcaaatagctaatattcacttacatgggcagtgtattagattcctagggctgctggaaccagttaccacaaaccgcatggccgaaaccaacagaaatatactctcattatctcattattctagaggttagaagtcctaaagcaaggtgttgccagggccacactgcctcttacagctctaggggagaatctgtttcatgcctttcgcttgctctagtgctgctgccagcccttgatattcctttggttggtacatgcacccctccaatctccacctctgtcttcacatggtgttactccccatgtctctgtttctgtgtcttctctaatatgattaagggcccacccttctccattgtgacctcatcttatatctgcaaagaccctgtttccaagtaaggctgtattcttaggtgtaggcattaggacttcaacatatattttgggggaaaattcaacccataatgcggttatgtttttattttccttgacttttaagaatgtgaactattgtcaaattttttcaaccactatcaaatttaaatctaagaactacatgtcttaaatttatgacctcttcattaaaaaaaaaataataacatttaattggtaccaaaacgtgaaagagtttaatgctttgcatttgcttgaggctgattaatgagtaaatgtgtcaactgtggctgttttaattagccagggttaattaatgtttaccacacttggaagatgaaaaggcatgtataaatgctctataatgtgaatcattttttaatttgttgttgaagcttatagtgtagccaagtaaggattgcttacatcatacttacaaagggaggttcattaatggatacaaatacacagtttgatagaagaagcaagacctagtatttaattatcagcaaggtgactaatttacagtaatctactgtatatttaaaaatagctaggagaacctaatttgaaagtttctagcgtaaagaagacaggctgggcacgatggcttacacctatagtcccagcacttgggaaggccgaggtgggaaaatcacttgaccccagcaattcaagactagccagggcatcatagtgagaccccatctctacaaaacaaatatttaaaaattagccaggtgtgatggtgcatgcctgtagacccagctgctctggaggctgaggtgagaagatcacttgagcccagcagttcaaggttcaagtgagctatgatcacatcactgcactccagcctgagtgacagagagagacccttcctcaaagcaaaaagaaaagaaaaacatttaagtgatggatatcccattatactgatttgatctttccaaattatatgaatatattaagttttctcatataatctgaaaatatgcacatctattatgtatcaataaaaaataaaattttaaaaatgtaaaaaacgatgttggagcactatggtacttaacgtagaggctctgacttttgaggtacattcattacctgttactgaagttgagtatgctttaatattgtatgtttagaaaaggtagttacatttttaaatctgattgtgtaagaagaaaagagtagaaatgtttggggccaagtcaataattatttagtatatcataatttgagatgaaatgtgtttttttttttcttttttagtttcaagttgaaacattttaagaacagataaggaaaggctaactgtgctgagatgaaaataacatttttaaagtaactatcttaaagaaaatacatttctagaattttgtgtaaattttcaacaaagactcagaagcctggatgaggtcttgtgccaagactggaaagtgtggggattagaaaaagtttgaagagattgttgtgagatcctctcgtatgaggcctgaagctgtacatccatggaaagcagttaccccaggcgggaaaacaggttatccattctcgagtgagtggccgggtgggaaatagtccatcatgtcgaatggatcgtactttccagcaccaagatttgtggttctctaggtgaataagatgacaccccttcacttcacttcacttcaccattgtctgcatggagtacgtatctaaaaacaaattagcaaaaaggttgggtctactttacttttcatctcctacactattttcttctttgttctcggcaggaaaagatgaagttgcattttattattatctcataggattcttattctaaaatgatttgatttaaaacccattgcactttatttggataaaaaatgcttcactctctagttcttaacaataacaccagcctgattttattacgttaagcactgcaattagacaatacaaagaatttgcagcaacaacatgttattttatcatgggtggaactgttcattgtctagcagaatttattaccagataaatcccttttggggaatctaatgtggatgtttttttcaaagcgcctgtggagttctgctagtattgggaacgtttccattttcattctgatgcttccctgtgggctgtttcagcatagaagtgagctctctgggtccatgtttccattggctccacccaatattctgaaagattgcaactcaacatgtgtaaacagaacctttctcccccatattttctcttttcgtagattaaactcaggtcaagaattagaagtttatcctccaccccgatagcatctcgccctatcccaaataccgccaccaaaatgcccactgtttttccttgggccagttcctgaaatatctttctggctgtatcactcttgtgtgcatccttatcggctatgcttttggccattttttactgctgacttgtctggttagtcttttataatctccaggcttctcctccatcctttttttacagtttacctgttcatgaagcgcaggtcacttgacccgtagaattcccataggctgggattttgctaattgcatactcatggtataggtcagtgtattcctctgccctctgtatcccacaaactgaaagcctcttggctaagctgcttcccttttcacttcccttgtaccacagcagccagaagagtcacagatcctgggcagcttgtcctctgtgcctcggtacatgcacttgtatctgctaggacaatgatctctttccctggggccccactgtaatatcactagtcacatccctaaagcccaggcttgtttctttgtcattctgtcggtatccctaccataacacttgtaatagtaattatttttatgcccatcttttcttctgaaccatgagcccttcaagtgaaaagaaattgatgaagttatttctagcactcccctggaaaaaggaaggcaggcagggagggaggggctcactagtttatgataaagtggtttgattttcttggttgcagattatttcttttaaagtgactcttttcagcttctctcactcctgtgcatcgtgaatgctctcctgaagacagacgctttccattcatttccaagccccccatgtgaagtgctttctgttgccaggcttggtttccccacacgttgttaaagaagttaaagaagcttgtgaataagctaaagcagaggagaaagaaccattgctatatctagaattgttcaccagaaagcaagttttgtgttaaagaaaacacgagtaggccactgtgcagaagtgcttacagggtttgtgtgctttttaaaatctgcataaataaacatttcaaatgagctatcatatatacaaggatgatgtgctgtctgtgggaaaaggacccaatcctgtgttgtgattttacatatatatatatatataatttgtgctattacacacttgcctgatccccttataattatctgcataagtctttttaggctctttgaatgaaattcactatgtatggatgttgaaaatcatcctttctaccatgagctcatcagacttgctaaccaattctttgcatcctttgaagtataaaattccatcaattcagcatgtatcaacatgaatcaattagaatgcactttcttcacagcatggcggagtttttgctggctgccgggaggggcactgtttcccaattcattcatttgcttgggcccgccccaggatccttcttatcccggtcagatagacttctctcatgagcttgagagacggggctggtcacacaggacacggctttagggacacgactcactgaaactacaaaatgagtgctgctcttagagttgtacccacagcctgcacagctgttatggcaatgctgtgggcaagtcttgctacggcccattctcctccctcccttgtcctgttggaaggttcaggttggagctgaaattcagtccagcacgcagctggacaagccatgtctcctgtatgtgactcactccccagagaaagcatcatgtggactagtaagggcttggctttatcagaagcaaaggagaggtttacatctcttcttgctctctcttagtgggttcagagctccagcagaaaaaatgggacactgtggattgatctccagaaaaccccaaaaccagcactgaaggctccaggagattatgcctttagattgtatacaggcaccagaatgacttttgcctttataaaaatgcgtgcaagagcatgaaaactaatatttgaggaatttttttttctcactgtactttctggtcctcactgaaagcattggcagttttaaaaaatgaaatgtgatactgttatagacgtagcaaacctcacgtttcattttttccaattcattctatatctaggaacttacttagaaggagaaacaaactgtacccagaaaaaggaatgaaactggagaattcttcctcatgattcctctgtgtcctcaggcctaattatcctcattccaaagactctccattgcctcaataacttcgaaaaatttactctccttaagcatagtcataaaaattgcatagtaaagtgataaagagacgaaaataatgctgtaagaataaaaccattaaaaaaaaaccactactcttgattatttctgctgttagaattgtaaatgaattctcattccttttttctacatttttggcatgaaatttatgttactcttataattagtaaaaacattatattttattaataaaagaagactcacagtgaagtcataacatatgctgcagaggttagactcttcaagtcagatttgaagagagaatttcacgtaacaatcaccttgaaatgtcttcaggtcagccatcaaagtacacatctctcaaccagccaggcagccagtttttcctccagcatgtgaagagtgaagagatagctgtttcttggcttaaagaccatatgaaataattgacttatgtttaaaagatatgagggatcaggccgggtgcagtggctcatgcctgtaatcccagcactttgggaggccgaggcgggtggatcacaaggttagaagatcgagaccatcccggccaacatggtgaaaccctgtctctactaaaaatacaaaaactagccgggcgtagtgatgcgcgcctgtaatcccagctactcaggaggccgaggttgccatgagccgagattacgcctctgcagtccaacctggtgacagagcaagactctgtctccagttaaaaaaaaaaaaaaggcatcaaaattacattcacttctatttttatttttgtttgtagaagacatgcagtttgtatcacattaatgggcatatgatgtaatttcactataaatcgaaccagaggaagacatccaaatatgtataaattaaagctgacaatgcctacagtactaaactttttgttttagtataattggagacttagaaaagttctaaaaatatatttaaaaatttttaaaggaagttgcagacataatggccctttacacctaaatacttcactgtacgtttcctcaaaacaagaagatatgtgtgtgtgtgtttgtgtgtgtgtgttgtaatcttaatacagcatctttcagagattatttctgtagtatataaacttggtttttttgtttgtttgtttgtttgtttgtttgttttgagatggagtctcgctctgtcgcccaggctggagtgcagtggcacaatcttggctcgctgcaagctccgcctcccaggttcacaccattctcctgcctcagcctcctgagtagctgggactacaggcgcctgcaccatgcccggctaatttttgtatttttagtagagacgcgatttcacctcgttagccaggatggtgtcgatctcctgacctcgtgaaccgcccacctcagcctcccaaaatgctgggattacaggcgtgagccaccgcgcctggccataaagttgttttttagtctctactttaagttcctgacaacccaggcaggaccaagactccctaatgtagttggaaatcagatcagcacattggcacaagttctacaggtaaacgggaaaaaggagccctacaatctgcttttagatgccagggagcctggctggtctttatcttgattactgactgatgccactggtaggtctaagttctttgatctatgatgtttgaaagccaaaaggaaatgtgttttaaaggaaaagggacttcttctgtaccctcagtctaagccagacaagtgatatttcaggaaaatgtccctagcaataaggaatattttcacaaatgatgtgaagctttgtttgtgtcccttccagggcagtttgttaccataaggggacaaagcatgcttcatttaaacatgtgtggccaggaaactgttatttttaaacaaaaataaaccccgatttagacatgtagtctgagttttaactctgggagattttcaagattgatagtgtagctaaaaataactgacctaattttctggaggtcaagataaaaactggatttgtggtacagcatttactttgtgataatatgtgtataaattcttccccaagttggaaaatgtggccgcgtcatacagggctgtatctctcttgaccattgaagtgcctaggtcgctacactacaatttgacttagagttggtgaaacttctggccattcacgtagccatcgtattcatcctgagaaagggaaacctaaagacttgggagagtgttctgggaggaaagtgctattgagaatgggctgtccaagcaaagtgacaggcaggcctcacttagctagaagagggagcttttcagccctgctccaccatcaggaatctccgtgaccttggactactgctttaatctcttttatcctggcttctaaaagataccgtcgaattcattctttttcaaacctatcaaaaatttgaaatgtatgaaaaagagggtgcttgtgatgatagatgggtttatgcttccttttttttttttttttttttttttttgagacggagtctcactctgttgcccagactggagtgcagtggcgcgatctcggctcactgcaagctccgcctccggggttcacaccattctcctgcctcagcctcccgagtagctgggactacagtgccaccaccacatctggctaattttttttgtattttcagtaaagatggggtttcaccatgttagccaggatgctctcgatctcctgacctcatgattccaaagtgctgggattacaggcgtgatatgcttctttaatattagtttctaatccaagtaatatagccatgtcctctataaaatggaacttttcatggaacagtgagaaggttgcattaggaattgggatacttgggttcagatttcagttctgccacttgctagttttaagtatacttctcaggatggatgtcagtttgttcaactgtcagtgggagtagtgatcccactaaggaagattattgtggttatcaaatcagcagatgggtatgaaaaggccatgagtgcagttctcatggttatgaaggtgtcataactggcatagtcccatcacagtatggctttggcatcgcagatggctgtagcatatatgctaatcagaacatccctaccgtccttaaagatctcatgggttctctcccaaatcagctgctccaccgacctacaagtaagtccatgcttctttagtatatttactcactagtgaaggcccgtctgctaaaagtgtcttcagtaggggagagctgctcttttctgggaaacccagcaatgaagtttgtcctgtgatgccctctacacttactgacctgtttcctgagaacttcccgtaacaaatggtccagggaagaaggaagtctgtgaccagtctttcctttcctgtggctttctggttcagaaatgtgaccctgatgataagaaacttcaaggcatgactctggtgttttggcaatattcccctggcagtattgtttcttggctcacactcatctcatgccttgctttgtttgctttgtttttgagaattgtttttttgtttgttgtttgtttttggttttggcttgtgagacagagccttgctctgttgcccaggatggcgtgcagttggcacaatctcggctcactgcagcctccacctcccgggttcaagcaattctcctgcctcagcctcctgaataatggggattacaggcacacaccaccgtgcctggctaatttttgtatttttttagtagagacgggtttcaccatgttggccaggctggtcttgaactcctgacctcaagtgaaccacccacctcggcctcccaaagtgctggggttacaggcgtgagccaccacgcccagccattatgtttgtttttctttcatgaagggataaccgaggctgttgtgtggtggtgtcttggtacagctcgtggctgtggtcagtgtggtggagggtaggtcttctcagatggtaacatgcatgagagtcacctggggatcacattaacatgcagattctgattccctggatctgggtgggacctgaggttctgcatgtctaacaaactcccagagaacacccatgtagcaagagtacagacaaaaggattcaaagcgaagggactgcaagaaccatggaaccagcctcccacgattttgcggatgacgaacccgagccttggggagtttcagaggccatggagagatgaagtataataaacagcatagcagttgtatgttgagccaagaatcagacatgcacagaactgctgattggaaaattaaatctgtttctcatagccctggtgtggcaaaatgcctagctggaagtgggtgaccgcttgatttacagtgggcctcctgggtagggaaaattagtccatcccatttacagctacttccaatgcagctgtgtcaggggagagagaagaaaggacatggaagagagcgtagaggtatgatcttcagtcctttcaggcaggcacataagtaaatttttatttaaaagataagaattggtcatatgcgaatctcctgttagataagattaaaaacaaatttccattttgtggagaagttgcagataaatatttttccatgggatccaaaagaatcaaaaaggaaagaaaatagtaatagcagtggaggttcgatcctagacagaagaaaatccagcaagccgagggacttcatattctcactggtgtccaaatcagagctttttttttttttctttgtttactttaagttctgggatacatgtgctgagcatgcaggtttgttacataggtatacatgtgccttggtggtttgctgcacccatcaacccgtcatctaggttttaactccgcatgcattaggtatttgtcctaatgctctccctcccctttcaccccacccctggacaggccctggtgtatgatgtccccctccctgtgtccatgtgttctcattgttcagctcccacttatgagtgagaacatgagtgtttgggtttctggtcctatgttagtttgctgaggatgatggcctccagcttcatccatggccctgcaaaggacatgaactcaacctttttttttttccttttttttttttttttgtatttgcaaattcaaatctttttttttttttattatactttaagttttagggtacatgtgacattgtgcagcttagttacatatgtatacatgtgccatgctggcgctgcacccactaactcgtcatctagcattaggtatatctcccaatgctatccctcccccctccccccaccccaccacagtccccagagtgtgatattccccttcctgtgtccatgtgatctccattgttcaattcccacctatgagtgagaatatgcggtgtttggttttttgttcttgcgatagtttactgagaatgatggtttccagtttcatccatgtccctacaaaggacatgaactcatcattttttatggctgcatagtattccatggtgtatatgtgccacattttcttaatccagtctatcattgttggacatttgggttggttccaagtctttgctattgtgaataatgccgcaataaacatacgtgtgcatgtgtctttatagcagcatgatttatagtcctttgggtatatacccagtaatgggatggctgggtcaaatggtatttctagttctagatccctgaggaattgcgacactgacttccacaatggttgaactagtttacagtcccaccaacagtgtaaaagtgttcctatttctccacatcctctccagcacctgttgtttcctgactttttaatgatcgccattctaactggtgtgagatgatatctcatagtggttttgatttgcatttctctgatggccagtgatggtgagcattttttcatgtgttttttggctgcataaatgtcttcttttgagaagtgtctgttcatgtcctttgcccactttttgatggggttgtttgtttttttcttgtaaatttgtttgagttcattgtagattctggatattagccctttgtcagatgagtaggttgcgaaaattttctcccatgttgtaggttgcctgttcactctgatggtagtttcttttgctgtgcagaagctctttagtttaattagatcccatttgtccattttggcttttgttgccattgcttttggtgttttggacgtgaagtccttgcccacgcctatgtcctgaatggtaatgcctaggttttcttctagggtttttatggttttaggtctaacgtttaaatctttaatccatcttgaattgatttttgtataaggtgtaaggaagggatccagtttcagctttctacatatggctagccagttttcccagcaccatttattaaatagggaatcctttccccattgcttgtttttctcaggtttgtcaaagatcagatagttgtaggtatgcggcgttatttctgagggctctgttctgttccattgatctatatctctgttttggtaccagtaccatgctgtttcggttactgtagccttgtagtatagtttgaagtcaggtagtgtgatgcctccagcttcgttcttttggcttaggattgacttggcgatgcgggctcttttttggttccatatgaactttaaagtagttttttccaattctgtgaagaaagtcattggtagcttgatggggatggcattgaatctgtaaattaccttgggcagtatggccattttcacgatattgattcttcctacccatgagcatggaatgttcttccatttgtttgtgtcctcttttatttccttgagcagttggtttgtagttctcctttaagaggtccttcacatcccttgtaagttggattcctaggtattttattctctttgaagcaattgtgaatgggagttcactcatgatttggctctctgtttgtctgttgttggtgtataagaatgcttgtgatttttgtacattgattttgtatcctgagactttgctgaagttgcgtatcagcttaaggagattttgggctgagacaatggggttttctagataaacaatcatgtcgtctgcaaacagggacaatttgacttcctcttttcctaattgaataccttttatttccttctcctgcctgattgccctggccagaacttccaacactatgttgaataggagcggtgagagagggcatccctgtcttgtgccagttttcaaagggaatgcttccagtttttgcccattcagtatgatattggctgtgggtttgtcatagatagctcttattattttgaaatacgtcccatcaatacctaatttattgagagtttttagcatgaagggttgttgaattttgtcaaaggctttttctgcatctattgagataatcatgtggtttttgtctttggctctgtttatatgctggattacctttattgatttgcgtatattgaaccaagccttgcatcccagggatgaagcccacttgatcatggtggataagctttttgatgtgctgctggattcggtttgccagtattttattgaggatttttgcatcaatgttcatcaaggatattggtctaaaattctctttttttggttgtgtctctgcccggctttggtatcagaatgatgctggcctcataaaatgagttagggaggattccctctttttctattgattggaatagtttcagaaggaatggtaccagttcctccttgtacctctggtagaattcggctgtgaaccatctggtcctggactctttttggttggtaaactattgattattgccacaatttcagctcctgttattggtctattcagagattcaacttcttcctggtttagtcttgggagagtgtatgtgtcgaggaatgtatccatttcttctagattttctagtttatttgtgtagaggtttttgtagtattctctgatggtagtttgtatttctgtgggatcggtggtgatatcccctttatcattttttatcgtgtctatttgattctcctctttttctttattagtcttgctagcggtctatcaattttgttgatcctttcaaaaaaccagctcctggattcattgatttttttgaagggttttttgtgtctctatttccttcagttctgctctgattttagttatttcttgccttctgctagcttttgaatgtgtttgctcttgcttttctagttcttttaattgtgatgttagggtgtcaattttggatctttcctgctttctcttgtgggcatttagtgctataaatttccctctacacactgctttgaatgcgtcccagagattctggtatgttgtgtctttgttctcgttggtttcaaagaacatctttatttctgccttcatttcgttatgtacccagtagtcattcaggagcaggttgttcagtttccatgtagttgagcggctttgagtgagattattaatcctgagttctagtttgattgcactgtggtcggagagatagtttgttataatttctgttcttttacatttgctgaggagagttttacttccaactatgtggtcaattttggaataggtgtggtgtggtgctgaaaaaaatgtatattctgttgatttggggtggagagttctgtagatgtctattaggtccgcttggtgcagagctgagttcaattcctgggtatccttgttgactttctgtctcgttgatctgtctaatgttgacagtggggtgttaaagtctcccattattaatgtgtgggagtctaagtctctttgtaggtcactcaggacttgctttatgaatctgggtgctcctgtattgggtgcatatatgtttaggatagttagctcctcttgttgaattgatccctttaccattatgtaatggccttctttgtctcttttgatctttgttggtttaacgtctgttttatcagagactaggattgcaacccctgcctttttttgttttccatttgcttggtagatcttcctccatccttttattttgagcctgtgtgtgtctctgcacatgagatgggtttcctgaatacagcacactgatgggtcttgactctttatccaacttgccagtctgtgtcttttaattgcagaatttagtccatttacatttaaagttaatactgttatgtgtgaatttgatcctgtcattatgatgttagctggtgattttgctcattagttgatgcagtttcttcctagtcttgatggtctttacattttggcatgattttgcagcggctggtaccggttgttcctttgcatgtttagtgcttccttcaggagctcttttagggcaggcctggtggtgacaaaatctctcagcatttgcttgtctgtaaagtattttatttctccttcacttatgaagcttagtttggctggatatgaaattctgggttgaaaattcttttctttaagaatgttgaatattggcccccactctcttctggcttgtagggtttctgccgagagatccgctgttagtctgatgggcttccctttgagggtaacccgacctttctctctggctgcccttaacattttttccttcatttcaactttggtgaatctgacaattacgtgtcttggagttgctcttctcgaggagtatctttgtggcgttctctgtatttcctgaatctgaacgttggcctgccttgctagattggggaagttctcctggataatatcctgcagagtgttttccaacttggttccattctccgcatcactttcaggtacaccaatcagacgtagatttggtcttttcacatagtcccatatttcttggaggctttgctcatttctttttattcgtttttctctaaacttcccttctcgcttcatttcattcatttcatcttccattgctgataccctttcttccagttgatcgcatcggctcctgaggcttctgcattcttcacgtagttctcgagccttggttttcagctccatcagctcctttaagcacttctctgtattggttattctagttatacattcttctaaatttttttcaaagttttcaacttctttgcctttggtttgaatgtcctcccgtagctcagagtaatttgatcgtctgaagccttcttctctcagctcgtcaaaatcattctccatccagctttgttccgttgctggtgaggaactgcgttctttggaggaggagaggcactctgcgttttagagtttccagtttttctgttctgttttttccccatctttgtggttttatctacttttggtctttgatgatggtgatgtacagatgggttttcggtgtggatgtcctttctgtttgttagttttccttctaacagacaggaccctcagctgcaggtctgttggaataccctgcagtgtgaggtgtcagtgtgcccctgctgggggtgcctcccagttaggctgctcgggggtcaggggtcagggaccacttgaggaggcagtctgccgttctcagatctccagctgcgtgctgggagaaccactgctctcttcaaagctgtcagacagggacatttaagtctgcagaggttactgctgtctttttgtttgtctgtgccctgcccccagaggtggagcctacagaggcaagcaggcctccttgagctgtggtgggctccacccagttcgagcttcccggctgctttgtttacctaagcaagcctgggcaatggcgggctcccctcccccagcctcgctgccgccttgcagtttgatctcagactgctgtgctagcaatcagcgcgattccgtgggcgtaggaccctccgagccaggtgtgggatatagtctcgtggtgcgccgtttcttaagccggtctgaaaagcgcaatattcgggtgggagtgacccgattttccaggtgcgtctgtcacccctttctttgactcagaaagggaactccctgaccccttgcgcttcccaggtgaggcaatgcctcgccctgcttcggctcgcgcacggtgcacgcacccactggcctgcgcccactgtctggcactccctagtgagatgaacccggtatctcagatggaaatgcggaaatcacccgtcttctgcgtcgctcacgctgggagctgtagaccggagctgttcctattcggccatcttggctcccacctcccgaactcatccttttttatggctgcatagtattccatggtgtatatgtgccacattttctttatccagtctatcgttgatggacattttggttggttccaagtctttgctattgtaaatagtgctacagtaaacatatgtgtgcatgtgtctttacagtagaatgatttataatcctttgggtatattcccagtaatgggattgctgggtcaaatggtatttctagttctatatccttgcagaatctcctcactgtcttccacaacggttgaactaacactctcaccaacagtgtaaaagcgtgcctatttctccgcatcctcgccagcatctgttgttgccagactttttaatgatcaccatcccaactggtgtgagatggtatctcattgtggttttgatttgcatttctctaatgaccagtgatgatgagctttttttttttttttcatatgtttgttggccacatacatgtcttgttttgagaagtgtctgttcatatcctttgcccactttttgatggggttgtttttcttttttttctggtaaatttgtttaagttccttgtagattctggatattagacctttgtcagatggatagattcagatcagagctttaacagccagactttacagggaaaaggctgagtggcacctcctttatatgaagaaaatgttcttctccaacccacttgtgttcagtggatggaagaagctgttcagtaattataactgacacttgtaacacataactgattgatttaatgcccataaattttattttctttaatcgtaagatgtgaccgttaaattcttagaagacatttggctagtggattaataattaaaagaatattggatgaattcatctgcttcctattcagcagttcttttatttataaggctatttttctcaaaatgaatgatcatgaatatctaagaaaaaacaaaatatttagctgtttgaagatgaaattattatcttttgatgttgttttctttaaagtgtttacaatgataactaagtggtagggcttcttccctctgttactctaagtatgcctcgtatacatcctcaaagcattttttttttttttttttttggagacagagtcttactcggttgcctaggctggagtgcagtggcatgatctcagctcactgcaacctctgtctcccaggtttaagcaattctcccgccttagcctcccaagtaggtgggattacaggcgtccgccaccatgcacggctaatttttgtatttttagtagagacggggtttcaccaagttagccaggctgctcttgaactcctgacctcgtgatccacccacctcggcctcccaaagtgctagattacagacgtgagccaccacgcctggccacctcgaagcatttgtaaaagagcaaggtgatggggttcattaggtgtttggtatttgaaattaaatacctctgttattgatgaagccatattttaaatattatcaccactaaactcagttaaatatttccactgttaactacaaggttcaaatgcttggatattatagaagatatttgacttcaaagataaacgctacaattttgggtcataacaaatagcttttagaaggggaaaaaataagtcttgggaggaaaataagcagtctcttagtttaatatagcggttggcaaatatagatgcttaaaagttctgaaaatccccattgcaggccatcagagtgttgtaattaagtattaaattaattcagataaaaggataatccatcagggccactaatgtagtggaagtgtggtttcggtgtgattagtctcaccatggaagtcaaagaaagtcccactcagaatgaacaatgaaagaatcatatttgtctctgggtattttgtcataggctcaattgcccagtgccagtgtgtaagccactggtaaaatcctgagcccttagtcatgtctacaggtagctggctgccttagacattttatgatgacgaaattgaattccacttctgataatggtaatccatcatgtctacctctttttttctcttaaaactacactgacggccaggcgcagtggctcccgcctcatcccagcactttgggaggccaaggcaggcagatcgcctgaggtcaggagtttgagaccagcctggccaacatggagaaactctgtctctactaaaaacataaaaactatccggtcatggtagtgtgtgcctgtaatcacagtactcgggactgaggcaggagaatcgcttgaacccaggaggcagaggttcgttgttctgaatgacatagccaggggtggttatttctaaattttctgtgttgaattaagataggaatgtggatttcttcctattttgaacaacgaccaaaaaaaaaaaacgaaggctaagtgtgtttcactctgctaaaaatgtaccttttcttgaatctgtcactttttcacttacattttctgaaaatgaatataattaaccaccatggggctcagcatgctggtggccatttggaggaacttttctaccaacagtgtaacagagaaaagagaaaagggtactacagcgtacctcaacctcccctgactgttctgtgaagtacaagtgtaagatttctcactgtgatcttttgctcctctgcctttttactgccaagggctaagatgggcacagggccctttccagctgcccctgcctgagaaatgcttatttgatgaccaaaagcaataaccattccataggactaacggtgattaagtcagcttacaaatccacaagggtggaagagactgctaaagatattggaacagacatgcttaataatgcctaatttctacagctacttttgtgataatacgagaggctgaaatagataggggctgaacatgggaaggctggtgttatgaagcccaggacttggatttcagcactggtgcttactggccattgggtcttgaagagattggttcctttctcccagcctcagtctccttgtcccatcagattaataatgcctgccttgggagaggagagtcatacaggagagggcatttgagctgggctctaaagagttcaaataacgtagatgagcagagatgggcttccaagatagcaggaatagaaaacaaaagtgtcagaatgggtatgcatggtcttttgtgggaataccccaagctatttagcctgagagagaggtgtggtgtagacagctggagctgtgagttccatggctagaaatacggggtgggcccagaccacagagggccttcagcatctggcaaaggagttggaattaattcggtagaaaatgaagacccactgaaacaaagagggagccattcttgtgtgtcaggaactaagatttcaggaaccaaacgtaaaataaaaaccagcagggagaccattgtctcagtcggtttgtgctgttatcatgataccagagactgggtaatttataaacaaacaatagaaatactacaattctggaggctgagaagcccaggatcaagccgggtgcagtggctcacgcctgtaatcccagcactttgggaagccgaggcgggcggatcacgaagtcaggagatggagaccatcctggctaacacggtgaaaccccgtctctactaaaactacaaaaaattagccgggcgtggtggcgggcgcctgtagtcccagctactcgggaggctgaggcaggagaatggcgtcaacccgggaggcggagcttgcagtgagccgagattgcgccactgcactccagcctgggcgacagagcaagactccgtctcaaaaaaaaaaaaaaaaaaaaaaggcgccttgtggctgcatcctccagaggcagcaaaaactgttctcacatggcagatgcacataaaggggcctgtgctggtttcctctagcccttttagaaggcagtagtccattcgggggcacggggtggaactgtcatgacttgatttccagaagaccccatctctcactactaccacagtggagatttaagtttcaacacatgactttgggggacattcagaccatagcaagcagtgaggagactatcgtaattatccaggcgaaaagtaatcatattcctaggggcggtgagggtggtgtggaaaagcaagcaggaaatggctgagagaattcagaaatagaatgcaaaaggatttgtcggtagtgtgagtactggacacgaagaaatacagggagtcctggatggctctgaaggattcaagcctgtgactgggagggagaatggttctgccatgattagaaaacaggaaaggtggaagggaaagccagggaccttgagtacagttgtgtacctaccaagtgcatggatcaggagggagccctaagttggtatctccagcaaactgttggaaatatacaaatttgagtgggagggagaagtcaaagctggggaagtacatttcagattcacccaaaggtaggagatctttagagtttcaagagtcgatgggatttccaaaggggagaattgtagaaagagatggaaagagatacaagaagaaaatgacagggatgaagagaggagaaaaaaagagtaaaaagagttattcagagatgtcacagggaagaagataagtactgtgtatgcgaaacagtgagaacatttccaaataaaggacatggtaagtgatagtagataccacagacccaagaacagcgtagcccctggggagttcaagagctttctcgctggcaaaggttatttcctgtcaagatgaatgtgtatgcaccaataattattagtattccagaatatcctctctttagcatagtaagtgcttaacagtcacaagcaaaagatttatataaaagaaatgctcatttaatttatttaatcagacattggctaagttattagccgctacctatggctttgtaaaacatgaaaaagttggaggaaatctaatgagggtcttttatctgtaagggaaaggtcatcatgggcatcaagtattgaattttagaaacggtgccacagtgaatagggatatattataactcagattagacttcaaaaggactaatttgcttgggacttccatcatttaaaatcacttgcaataaaactgactacatgaaaagatattaatcacaagctttaatgctattccatcaaattattttaatgggtatatttgaacagaattttaatttttcagatacattttttgtcaatagaaaagagaatttgaaagatgattgtaaaatgttacaaatcaaatttaaatcctgatcttattttcattttctctagcaataaaactaaccagtgatgtgtctgaaatatatactacagcaaactcttgacacagctatgattggaaaatgagacattttggttaatcaaatattattgttaatagtgcagtgctgtctgtcggtctctaatttgtaaaaatcagagaaaaacatggtgaatctttggtgacataagagaagactcacaaatcttcatatcctggggtcagtttttaaagcagtaattacacatgatacaagattatattctaagctctctttttccagtaagaaaagataagtcaatgatgttccataaagctgattcttgtttaatcaatttttaaagtgggggggtaggcggcactgacagcattctttggaaagggaagcaacagaggagaaaggcaggatatttggtgtctgctcacattgggaaatacggggagccaggggtggttaagtccagagaaggctggatgtctgtctgcagggctacatctggaagggcaagggaacagtttccttgttgcctcagagcataggtcatgcagcacaagaggagcatttaggaaatgcagattttttttcaaggcaagacagtgaaaactattcaagaaggtagcaaactactggccctttaatgcttttcttatccttgcaagtgtgcaaggcaagacaggagattgtctgttgtctttcagcttgaatgagattgtgcctcacttactgccgccacaccaaagcctggcgtttattcctgtgcgatcattgtatactagggacgtctaactgtgtcaggaggaaatggcagctgagcccctgtggcctttcacctctagcagtgccacgctgcagcacattggccggctgccatgctcctgcctgcagtcctgccagcagctcttgtgagctgcgactttgcataagtagcttgaatgccatgtgcctcagttttcacatctgtaaaagggagatgataatggtacctatgtcatggctctaaacgcgatcatgcacgtgaaagcagttgaagtcttgcctggcagaagtaaatggtggctgctgctgctgctgctgttgtgattgttgttactcaccaaagagatggttttgtttggtttagatgagctgcttcagaaagagcaaaactattcagatgacgtcttggccaacatgattagtgaaccaaggatcagttacggaaacgatgctctcatgccatctttgaccgaaacgaaaaccaccgtggagctccttcccgtgaatggagagttcagcctggacgatctccagccgtggcattcttttggggctgactctgtgccagccaacacagaaaacgaaggtaagagtcccctgagccagcaagggcgttctgggaggtatatatacacatacataacgtgtgtgcaagagagagagttatcttttgtatgttcttgagtggtgaattttttttgatgtagtcataaatattttcattataattttactttaaaaagtaaatactaggagttactatgtcattaaaataatatatctgtgtaaattattctttatattttttatgctgcaaagcatgtaaactgccaattgttggaaaagacaacaactccattgtataggtggcaaaacaaaatggtaatgatttacataacatttgcaggtaaagggcctcttgtttcgcacatgtccaggtttgcattctagggaatattatccttcgagtgaacactcccggacgaaggggagccacagtgtattattgaagaggcagttcttcacaaggaaaatgtgtggcaataacattcttctaatttttattttccagttcctcttcttaatataaaatggtacattatataacaaaagtggatacataaagagcatgtactgtatatcatattattatgtttatgactttttcaaatgaggaaatggaggcaccaggagactaagttcttaagtgatgacttttggtaggaattttttagaaatgttttttaactgtgaggtatattgttccctctggaatggaagcacaaaattcaacttgtgtttatgacgtaatgacctagaatgccaccttccaaaaaagcagatagatagtgaaataaggaaaaattacagtttaccaacagagaggagttttgagggcctgcagagatgcagatttgacaggcaccaaagtagtcttcactggctacttattcttacatgaaatttcagattgaattaaatgttaaaggcaaagatagagaactacatataaataaaatttaattttgcttaagacttaatttgtgtttagaaaattaaatttaaggcagctgccaaaattaaggagcacattgctctaaatgttttttcctttggtacctcagagaagtaagattcttctctatcaacaaatttgagcagtagatggcatcctttttcacagggatttcttagcagaaacacctgttcaggcaagaatatctttcagcttcttttatctttttctacatgttcagaagtatacaattacacacaaacaccttgatttctagatacaaataacatgttttttaagaacacaacagcactttacctgattttctttatcaaagcagcaaatgttgatggagatttcatatttataatataccttataggccaggcatcgtgggtcacgcctgtaatcgcaggacttagggaggctgaggtgggcagatcgcaaggtcaggagatcgagaccatcctggctaacatggtgaaaccccgtctgtactaaaaatacaaaaaaaagttagccgggcgtggtggcgggcacctgtagtcccagctactcgggaggctgaggcaggagaatggcatgaacccgggaggcggacgtggccagtgagctgagatcacaccactgcactccagcctgggtgacagagcgagactttaaatttaaaaaaaataaataaataaagtaaaaaatatatataccttataacatgcaattagtactaaatctaaatataatattagaccttaagtgtactggacaagttttttctaaagaaccattgcagaaaatatatagactattttcacaatgtgaatcatcaccccaaatttgtttccttaatttgaaaaagggcaccttacagtaatagcaaacagcatgttactgacaatgtaaaaataattaaaactttaccatttatgaaaataattcttaatcacatagaagaaaacaattttagggacagttcattatcaaagacctggaaaactgtcctgttaaatgtattgagtgcagattgttttgtttctttacaggtagatagattttggtcattgaaggtcctcttcattcagtctctaatgagaatttttagtgaaaaatgtccgatctcattttgtaaattgaatgcacgctaaatttgctcttttactaacagcataccttgttgcatcagccttaggagaaaatctgcgtgcacacgtgtgaatgtacacacacacacatacactgtgaacccttggtaattgccaggatgtccatttgagcaaagcccttgattaagtacttctggatacttgacaaacacgcagctattacattgcctaggtctcatgaaaagagctgatattcttgttggatgattctgtttgaacagtagaatctggtataacaattttgggaggcaatagaacttgcagtgtcagagtcttgagttgcagtactcttcattatcagtcccaacattgacatatatatattgattatagcaaacaatttaaaaagccacttaagcaatttttttttttttttttttttttgagacggagtctcgctctgtcgcccaggctggctggagtgcagtggcgcgatctcagctcactgcaaactctgcctcccaggttcatgccattttcttgcttcagcctcccgagtagctgggactataggtacccgccaccacgcccggctaattttttgtatttttactagagatagggtttcaccgtgttagccaggatggtctcgatctcctgacctcgtgatccgcccgcctcagcctcccaaagtgctgggattacaggcatgagccacggcgcccggccccaattggtttttaaataaaatagacggccatcatctcataggatattaaatactaccccatacccctgaactcctgaatgatacagacccgagtttaaattccagccctgctatgtgcttctgagcaagttacttagcctctctggctgcttcctcgtctgtaaaataaggttgacaataattcctaactcagaggtatagtatgagcattaaataagaaggcataaaaaagctcttagcaaaattcctggaacgtagtaaatgtcagtggtagctttttttttttttaatggagccaggatcttattagagagactttatcagcctgtctcaagatgaatcaccttatggcctcaacaatgtatccttaaaataatgaatataataagccatataatgagatacagtcctaaagccgtctctcttctaacaccgtctcccacctctccccagaaacttgttagtctttctttgtacagacatgtgcacacacacacacatacacccaactactgaaaatatctaaaattctcaaaggatttccttttgttcttcatgcagtcctcattatcatagtttcaaatgcttaccaaaaatttgttgtttttcttaagaacaatcagtgaaatccagaggaggttctgatgcccattttttaaatttacattgaagaaaataagcatatcagagttttccaatgtgctgtgatttgccttaacaattttttattctttggttttcacatccacaaaacctaaatgaatggctaggctgaaatgaagctgttgttacagaattgtgctcacagatcgtgaaatgatctggctggaagcattagcgttgatgacatttgtgtttgttctactttttcctgactgcctgagaagggcagccacaaagagcagcatagcatgcagtgactgccagcaagtctttgtggccaacagtctgcctctttgtagataatacctagatataatatgtagataaaataatatttttaaagagacaaagcaggtcttataagacttgtatggatgtatttgcaaaatgtgaagctgccttctagtatatttttaactagctttatagaggcaatgaggaagccaatttaaatgttgaaatttagattaaataaatatttcattaaacttacaaaccagttcttgtcagcctcttatctatatgtaaaactggtgtactgctgattcctcattacctttggcctggtagagagtttgtacaaggcagcacggttaatagttgaggtttattacaaagaataccagaagtaacagactcaaaaatcccagaggtctgaccattctgtttctctcctcttacagcaaaggatttgattcaaagctactgagagcaagagaataactcatttctgcttacattttattttaactctattaaaagttaaagctaagataatgtatttcttgtttttaaattactaaacagccaatgtaagatgttttttagcacttcattgatgaagttactgtctggttaagtaaaggtcaattggaaaaattggaaagtatttgcagtggattgggaaataacacactactttgttttgttggtgtgtattcttttttttcggcaatgatatcataattgccttttaaaaaacttttaatgtctgctccctgagctacttattttttgagcattaatttatactaaatcagcttcaatcttttaaagcagattagggtttatgtcactgaaactagttttgtttaatcttcctaaaaaatagggttagggttttattattgtttttaaataatacatgcctatttaaaaaaatagaagaagaagaagaagagcggggagaggcagagaaacttataggacaatatcatttgtaagtttctttcacataagtatacgcatttgaaccctggaaaaaccatttactttgtgacacaactgaagttcagaaagaatgtgattagccccagatcacagagaaagtaagtggtgacattagcagtggcccgtgggactaccagctcctcagcctgcatttaaaccacaggtacacttaacttactgccccgagttgcatatacattttctaataacgtaactattgatgtatgtgctcaccaccacttcaaggtacgcgtttgccctcgtgcatgtggtctgttgtgttcttaactgcagttgaagcactattgggtccctcatcatcaggaaattctcacaaagtacaatgacctttcaactaactgcattttacaaggagtaatacagttactcattacaggttgctgcaaataggaaaaaaaatgaagtatagaaaaaccaaacctcattgtcgaaatgtatttgggagttgcagaaggaagtgaactatgtcttcctctaatgcactagtgaaatactagagaatagtcactctcgcatcagtagttactatggaatatttaatcataggatatttaatcagtgcagttctgtagtatctggtagggtctcaaacaggctttaaaggttacttatttgttcctcaccataattagaagatgcagatgttaacatttctgtttccatatggagaaacagccacagaagtggcgcatcccaaggccacagacattgtaaatgttgggcccaggcctgggattagatgcctcaccctccttttgactccaccatgctgccagtctctacatgagaaaggaccaaatttttatttcatccaaatatcctagtgctcccggaaatattttcttatattttggagacttggcttactgccactttttttctccctcactgtttctattaacatgtggcatccaaaatcgatttggactgagaatcccacctttgaatgcctggcctgtgtgcatcagtaagctggatggttttgctgaaattgttagaagccatttcatcgagcacaccgtgtctccttcagcacctgtgctcactttgtcttacctttttccctttacacttgccaccttaccaaagcagcttccccctgcacctacctccgtggcttcatttaccctatgaccattattaatcctaaaaacttcacttttgtccccattccttgtttcttcaaacgccagcgtaaaacaaggaagtattttctgagcatcagaagtgctttggaaaggtcagatgatggtgaggaatatcatgctgtccacactgctttctttgggtcggacccagaacacataaaaagggaaaattgtgaacaatggcaaatataaaatgaaatatcctcatttcacacgtttcagctgtatgtcatctgtcaaatggaagccagcctttttgaaaaagtgagaaaaagactgcggtttccctcttctgccctcatactaaggacaaatttgattcactcactaaatggcagattatatagtaaaactttgctctcctgataaattcatatttgcacttcccctggaaatttaacagagtccttttgtagttaattaactgtaaaataagataagattgggcagttgtaaaaggaagtatctttaaggttttctgctaggctgggaatattttatttctaatcaaaagccaagaaactatctctaaactagctcagagggaaatccaccctccccacccctcttctttgatgttgctgcgtatcctggtgagggcttttattagaaaactaaggagcaggactggcacatcaatagcgataagccatttaaagtggtgcccctcctggtcctcgatgctcgggattaactcactgtggttcttttctggctgctccttttttgtaacttgtttattgcatatgcttttttccctgctcgactatgtttgggagccacgacttaccatcttgatttgtcttgtttgctttctgtgtcccttgcttcctgtgcccagttgagcctgttgatgcccgccctgctgccgaccgaggactgaccactcgaccaggtatcagaaccgcttgacttgtgcctctccgcatcttgggcctaagctcgagcagacgttgtctcctttctgcattttaagcctctctcaattgtacttactgcagagtagaatttgaagtgaccttagaaaccaaacttttaaaaattccccttgactattccttactcttcatttcccaagttccgagtgaaatgattttttttgtttctgagctttccctttgaaacctaaaagagagcccttccaaatttgggtttttttttttcttttttctttaaaacaaacaaaacaaaacaaaaacagagacgattatatacagcctgtccttaaaaacagaagcccagatagatgtagactctcaggtgatgacttggataccagtgtgaacatctctcctttcttgtttggtgtccagatgggtaattttctaactgaactgggctcaaacttcaatcagttactgaagtagacatgatttcctgaaaataccagaattggtttctttccagagcccaaaatacatcttctgttttgtgggttgtatgtacttattctcaatgagtggctaaagtaacacaacagatgtggatgcataattttgcacataagccctttttttatgtattacttaaaaatcccattaacactgaaatagacacttctttttttacagtttcacaaacattaagaagaaacacatttttattttatgaataatgtcatagcacagcagaagcatatatgtgcctggtgtctactctatgaacaacctcacccaactgatagtagccagtgctttcagtgaatcaaaaagaggaagaaagttattgaattgacaaatttgtgtattccagggagattttaatcccaaataacacatacttttccatatttattttcttctttatcctcataatgtccccaggcgatagtcaaagaacagggaattaactttctttgaagatattaatacacagaggtcaacctttgctgcctggttcagatacagtcagcagcagaccaggagacccaccctgtccctcacacttccaccacaggctcgagccatgactgcctccaagcacggtcactgatgaagactgagagtctgcctgtggcatcttcatgcctttatgctgtgattaacagtggcagcagagacagtagtgtgacacgtcttgacagctggtctcgttgatttatgaatttctgtctgtaggcttttaaggggaacttaaattatagtgagtcagagacagtttcagttcttctaatgtcctccttattgtcaatgtcatgtaagggaatctcaaggagccaggagttgacattcctgttctgctcagccaacttgtaaggcctcgggctgagggtcagttcagttctaattgcaaccacagccagctcaggttggtcatttgccttgggacttttttcatggtgcttctctttaaaagacatgctcttcatctacaagcataaaatgtaacttagaaagcgctcattcgactcattcaattttatcaaatttctacattgggccaggagagcctatatgttactattgaaacatccaggaacaggtgacactaccagtcaatgtttttttcttttttaaaaaaattgttttttgattttttttttttttttttgagatggagtctcgctgtgtcccccaggctggagtggagtggcacgatctcaactcactgcaacctctgcctcgggggttcaagcaattcttgtgccccagcctctcaagtagctgggactacagatgcgccccaccatgcccagctaatttttttgtattttcagtagagacgggatttcaccatgttggccaggctggtctcgaactactgacctcaggtgatccacccacctcggcatcccaaagtgctgggattacaggcataagcaccatgcccggcctattcttttaaaaaaaattttttttaatctaaatctaacaaaaaggacacctccaaacgctgtcaaacaaaaacagtgtgttttaaaggaagagctagagaatagttaatggtattacactggtgggagaaaaccatccaaaacctttctcataacagtaagaatatgatgtcacttggggatttcacaaagatcaatccactaaattctttctaggtttgaaagaaattaaacggtagggtccctgctctcaggagcttgaggtataatagaaggaattttgcatatttggaaacatgagatggaatttggaagacaaggaaatacaaagcaacattaagtgctaacaagaatgttctgtgatgggaggagatggagtactaacccaggggcatgttaagtagagaacttactggagatgggcttccagagaggttatgaaagatttgaggcacctggattggcaaagaagaagggaacaattctattcagaagagagggtggcctaagccaagcttcctttcatacacagcgtaggcttgggttgcccagtaagatggctaaagttgagaaagaatgctcagatatgaagtgaggaagattctagttaaggtttgtctatgaatagcagtatttactgcacatgtattaagccatgcgtgtgttctgtttttgtgcttgtagtaagtttatcaaacatttgggctaatttccccgtgttttgtagcatagctttggttcttcttcacattttagagaccacccacttgagtctaatgtgccgaattatatctttagcctttccaaacttagaaagccttcccaagattgtcatgccgttcaagtgatggcattgtttttgaataatcactgttgtcctcagaaacaagttaaaaaaaggtttttgtttttcccccacccagtgctttataatcatgactgaggaaaatggcttctccttaactctcatatctaaaaaaacagaatatggtagcttccagcatgcagtgtcaagtagggaccattgtaataacagtggtgatttgggggcatagtggccattatagctcctcctcctggcttacttccaaagaaaaaatagactctgaaggactaattatacagtttgaccagaataaaaaagaaaaacacattagcgagctcttcacatagggtagaaagctaccctttctgttacaattcatcaccacccttctgcagtccaaataaagggaaaccaggtccttgacccgagccatgcaagaggtgtcatgaaggacatacctcccttagcccccacatgaacaaaaggctctgtccactcatcatgacttacaggaagagagagctggagtcaccagggcttagggtgaaatcagcacaactcaagaaagacctctaagtaagcctgcaaaccaaggtccctgccatttatttgaaactactcatcacattttattacatgcattatcaccttattatgaatatttccctatgtgccagcttactgattttgtcttttagtaagatttgcttaatgtaaaaagtcttccctagatgactattcatgctaaacaaacatgaactattatagcaagagctcttctgccaagagcttctcaaactattgagctgtaaacatgaatttatctgtcatgctgacttgataatatgaatttttttttttggaccaccaaaagtattcacagtatcatttcaaaagtagtgtgggcttgtaaagtttttagtggagagctcttggttttgttttttttttttttttttttttaaaacaggatttgtctctgtttccaggctggagaacagtggcatgataccagctcactgcaacccccatttcctgggctaaagctatcctcccacctaagtttcccatgcagctgggattacagggatgtgccaccacacctggctcatttttgtatttttagtagagacagagttttgccatattggctaggctggtctcgaactcctgagttcaaactgtttgcccgcctcagcctcccaaaggctgggattacaggcatgagtcactgcacctggccgagagctcattctttttttttttttttttgagatggagtctcactctgtcgcccaggctggagtgcagtggcacgaatctcggctcactgcaagctctgcctcctgggttcacaccattctcctgcctaagcctctagtagctgggactacaggtgcctgccaccacgtccggctaattttttgtatttttagtagagacggggtttcaccatggtcttgatctcttgacctcgtgatcctcccgcctcggcctcccaaagtgctgggattacaggtgtgagccactgtgcccggccagagctcattctttacttttatttttcagtataaatatttggctccaaaatctaaaagggaagactcttcaaactgttcaagaaagttttcttaaaaatctcagaaatatagttctaacctattgtgttgctagatcttttatttatttatttatttttggagacagagtctcattctgtcacccaggctggagtgcagtggcacaatctcagctcactgcaacctccacctgccgggttcaagcgattcttatgcctcagccttctggagtagctgggattacaggcacccgccaccacacctggctaatttttttttttttttttttttttttttttttgtatttttagtagagacagggtttcaccatgttgaccaggctggtctcaaactcctgacctcaagtgatccacccagcttggcctcccaaagtgctgggattacaggcgtgagccaccgtgcttggcacgttgccagatcttaataacagaaaaggagtgagctctaaagaaatcactggttatataaggatctcagatttaaaagggctatagaaagattaaaatatacagccagtgagaattaagagagttttagcatcactaccctataaaaataagtgtcagaaaggttcgtttcagcagaatgagttgaaacttaaccaaaaaatacttaacaatattaaagtaagaaaataaataagaatagagaactctgtgggtctcgtagcaagaagttgggggttgagggttaggtcattgagaggaccagagttaaagaatgagaaagggaaactgtcccacttccattgtgccttttatgtctatattaaagagaatgaacttctgatgaaaggaaattaaagcccgagatagatcaacatgagaaaagaaagccctagcccattagttacctattgctacgtagcaaataacgcgagaatttagcagcttaaaacaacaagcattagtttcttacagtttttataggtcaggatttgggatgtggtttagctggatggttctggcacagtgtccgtcatgtggttgcagttaagacactgcctgagctaaagtcatctgaaggtttgattggacctggtgggtctgtttccaacgtggctcactcacgtcactgttactaagagacctcagtatcttaccatgtgaactctgtaatgctgcttgagcgtccctacaacatggcatctcgcacccctgcaccaagaggtccaggaaagagattaaggaagttttagtgccttttttggcccagtctcagaagtcatacaccatcacttctatcatgctctgttcactagagcaagtcactacatcccgaccacattcgaaggaagggaatcaagttctccctcttgaaggaaggagtatcagcaaatttgtggatatattttaaactatgacatcttgctacccaagtccaagttcttatgacccagaccaactgcaggctaagagaacttgaaggggaagtagcaccattgcctgtggtctttgtggaaagctgggaaggtagggataggaaaatgaagttctgaatagcaaaaaggagagaagatagcttcacaatctgtaagccaggtatagagtgacattgattgtgggtctcttttcaaataggttatcaagtggaagctttttgaacaattggatgaggaaatggtgctaggtcacaaccagcgtggatttcctaggttttgtcagattatccttaccttctccttgtataggctgtgctcttagactggcacatcatatgctgtggacattgtgcttttcagtgtcagcaagatgtgtcacaagtttcccagaatctcgtagacaagattgaaagagtgattaggccaagagcaggaagtgaattcccctgggagccaaaggaattgggaatgtgtagcccaagtaagacaagaaccagcaggaacatgcctctccttagggtcgtgatacctgttcaaggttttaatgtggaagggaggattaggcttgctctgtgttgaatcaggctcaaaggatggaagttacagggaagctgattctggcttcatgtaaaaaaaggacagtttgggcaggcaaatctatcaaaaaatggagggaaattgatacattcctctatgttcaaacaggaactgacaatctgcccctgggtgggaacacggtagagaagatgacttcaaaagcccttttcatcctaaaattctgatgtttgataattaaatgttatagcatggacactgacatttacattttttacttatgtttttggtttttaaatgactctgcattttgttttaagcttcaaattattatttgaataatgaaattcatcagaacaattagtgttaagaatcatatagcaatttatagaaaaggaagagttcgtaggttataaattctgttagttgctaagaagcatttttaaaattatgtactatagctctttattcagcagacgaaccaattacaatctgtgtaactagaacacttgactaaaattatataatttttacaacgcttcactgcatagatacatgaacataatttatttgtaattggaacaaagccccaaagtagcagttttgttctaccaggtaattaatgctcatttttaaagccttttattattatttctgaagtaatgagtgcacatggaaaaagacacataataggctaaacaataagcccgtaagccaagccaacatattccaggaacaaatccttgccaacctctcaaccaggatttaacttctgcttttcccccattttcaaaaattatagcatgtatttaaaggcagcagaagccttactttcaggtttcccttaccctttcatttctttttgttcaaaataggtagtaattgaagttttaaatatagggtatcatttttctttaagagtcatttatcaattttcttctaacttcaggcctagaaagaagttttgggtaggctttgtcttacagtgttattatttatgagtaaaactaattggttgtcctgcatactttaattatgatgtaatacaggttctgggttgacaaatatcaagacggaggagatctctgaagtgaagatggatgcagaattccgacatgactcaggatatgaagttcatcatcaaaaattggtacgtaaaataatttacctctttccactactgtttgtcttgccaaatgacctattaactctggttcatcctgtgctagaaatcaaattaaggaaaagataaaaatacaatgcttgcctataggattaccatgaaaacatgaagaaaataaataggctaggctgagcgcagtggctcaagcctgtaatcccagcactttgggaggccaaggcgggtggatcacgaggtcagaaattcgagaccagcctggccaatatggtgaaaccccatctctactaaaaatacaaaaaagattagctgggtgtggtggcaaacacctgtagtcccagctgctggggaggctgacgcaggagacttgcttgaacccaggaggtggaggttgcagtgagctgagatcgtgcctaggcgacagagcgagactccatcccaaaaaaaaaaaagaaaagaaagaggctgtatgtatagttctttcagactacaaggcagcaaagttcgtgcatgactcgggacttaaagtggaattaatttcaatatagcagccactttgacttccactgtgttttctgggaaaataggtttacaataggtttatttgaaggatcaaacacatgcatacactgcttggttttacagaacactttatgtggcttaaattcacatccggaactgtcttcctttacccattcatttctcccccagctctttcttttcattccctcccctacctcccatgatttaacttctcttgcaagagtaagatcatggagtgagcaggaccccatgatgttcccgatagtgttattcatcaaaaggtttgtgcaaagaagacagcagcttccttttcagatgaaatcacttttcccccctaatgttagaattggagtaaatcaaaaagccacatctcctttgtggtcagctctagtagttatataaaatcctttaccaaaagcttagaaatggagataaatcaaatcgtggattatgttagggttccatcttatcagtaggtgcagtaagagggttaaattaatgaagacgacaattttatcacattcagtggtggacagaaaaatggtaagaaaatttccatagcaataatacttaaagttatctcaggcacttcttttgttttgttttgtgtgtgtgtgtgtgtgagtgttacttttttccaagcagaaaatgtcttttcaatattcataaagttgataaatcctagtattaatctctaaaagaaacacctccaaattattatttatgccttacttgactccaaataattgtagcaaataaaaaactgacttgggatttggatttgcattcttaactcccatagttctttttttgtagaaagacatttagctttttgaagcatggttttcattggcaagataatctagtatcagttgttataagatcagggtttctcttgatgaggctgttgctgaagaggttaataaaaactggggaaccactaaagagttgaagagttggtggggtagaaagctgacgattaatgtacagatttgcatttgtcggggcctggggcctgtgtcatataagcccatccccacaattacactaacgcctataatgcgacagtgactaatggcagcggcagcaattaggagaatcagctccctctactggactagttaagataatgtattataattagtgcaatgaatattacaaaattacagtattttcttaaaggcacaggcatatgtccagacttgtatttattcctgattacctcacactagtatattagctaattaatgatttgcttttcataaaaatgttgagctagcatatttgtttagtaaagggaataattatgaacaatttctcattttgttataaaccacgagtaaaacacttttagaagttgcttcatttgctatattttatattgcctttccagattgctagtatgttagtttcagcttagaaaaatcagtcatttgactaccttgaggctaaattgaaagaattttttagggaggtacaggcataccttggaaatttcagaacaccacaataaaacaaattttgcaacaaaatgtcacacaaattttttggcttcccagtacatataaaagttatgttggccaggcacggtggctcatgcctgtaatcccagcactttgggaggccaaggcaggtggatcacaaggtcaggaggtcgagagcatcctggccaacatggtgaaatgccatctctactaaaaatacaaaaattagctgcatatggtggcatgtgcctgtagtcccagctactcgggaggctgaggcaagagaatctcttgatcccaggaggcagaggttgcagtgagccgagatcgcactccagcctgggcaacaagagcaagactctgtctcaaaaaaaaaaaaaagtttgtatttacactatactctagtctgttacatgtgcaatagcattatgtctaaaaaaaaaaaaagccatgtatatactttacttttattagtaaaatattttattactaaaaatgctaatgatcatctgagtcttcagcaagtcctaatctttttgctcgtggagaatcttgccttgatgttcactgctgcaggctaatccaggtggtggctgctgaggtttgtggtggctgtggcaatttcctaaaataagacaataatgaagtttgctgcatcgattgactcttcctttcacaaaaagatgtctctgtagcatgtgatgctgtttgatagcattttgctcacagtagaacagctttcaaaattggagtcagtcttcgcaaatctagccactgcttcatcgagtttatgtgatatcctaaatcctttgttgtcatttcaacagtgttcatagcatcttcaccaagagtagattccattgcaagaaaccactttctttgctcatccataagaggtaactcctcatccattcaagtttgatcatgagatggtagcagttcagtcatgtctttaggctccacttctaattctagttctcttgttatttccaccacatctgctgtgacatcctttactgaagtcttgaactcctcaaagtcacccatgagagttggaatcattgtcttccaaactcccgttattgctgatgttttgatctcccatggatcacagatgttcttaatggcatctggaatggtgaatcctttttagaaggtttgcagtttactttgcccagatccattagaggaatcgctatctatggcagtgaatagccctacaaaatatatttgaaatatattttgaaataataagaggctgaaataataagacttgaaagttgatccacaggctgcagaatggatgttgtgttagcaggcatgaaaacaacagtaatctccctgtacctgtccttcagagctcttgggtgactaggtgctttgttagtgagcagtaatattttgaaatgagtcttttctgagcagtaggtctcaacagtgggtttaaaatattcagtaaaccatgctgttaagagatgtgctgtcatcccagttttgttccatttatagagcatgggcacagtagatttagaataattcttaagcgccctaggacttttacaatggtcagtcttggcttcaaaaacaaagtcgccagctgcattagcccctaacaagagagtcagcttgttctttgaagctttgaaggcaggacttctctctagtgatgaaagtcctagatggcattttcttccaaataagtctgtttcatctccactgaaaatctgttatttagtgtagccaccttcatcaggagtcttatctagatcttctggataacttattgcagcttctacatcagcacttgctgcttcaccttgcacttctgtgttatggagatggcttcttcccttaaacctcatgaaatcaacctctcccaacttttttttcttctgcagcttcttcacctctctcatccttcatagaattgaagacagttgtgggccttgttcttgattaggctttggcctaagagaatgttgtggttggtttgatcttccatccagacaactaaaagttttctccgtatcagcaataaggctgttttgctttatcatttgtgtgctcactggagtagcacttttaatctccttcaagagcttttctttgcattcacaacttggctaactggcacaagaatcttggctttcaatatgccttgcccactaagcttaattatttctagcttttgctttaaagtgagagacctgtgactcttcctttcacttgaatacttaagaggccactgtagggttatttactggcccactttcaatattgttgtctctcaagggatagggagcctgggagttgagggggtggagtggccagtttggggggcagacagaacacacacaacatttattgatttagtttgctgtctttatgggcatgtttcatgacactccaaaacaattaaaatagtaacatcaaaggccactgatcacagatcaccaaacagatataataatttttaatgtttgaatatttaaataattaccaaaatgtgacacagacatgaagtgaacctgtgttcactgttggaaaaatggcaccaatagacttgttcgatgcagggttaccagaaacctttttgttttttttttttaaatactatctgtaagcactactgtacaataaagctatgtatgcctgtattttcattaagttgcagagcaaacgtggtaatatttagctttagttttacttcatctggcataagatcaactccttatataacaagatgataaaagttgtggtgtgcttctataatttcattcaagtagataaagttgaaaaataatgacttgcttttataaacagtatgaagcaatgtagtgcagtaaatgaaattttattccttctttacaatgttctcaaaattatttttatgtttaatccaaataaagagcaagaataaagcaacatttcagattttggtttctggagacaatagttagaaagcatgagttatgagtgacttaaaattcttgttgcctgtacttcactttgaaataacattatgctttaaaaagcattacactgctaaaggttaattagaattctgcagaattactatagctaaaagtaggtaacaagatatctttttttctattgtttaactcctttgtttcagaatgcctattcctgtgcattaaaagtgtccctccaaggaaattaggacatctgcagagttgaaaaacacctaagtctcagtcacttagagtcacacatcagggctcagagtgctatgactaggaaaatgctgacctcctttcattagtatgatcgtgcctttccagcttttgatagatccaagcgctatcttcccaccactcaccaaatgttccacctgtcaaagggtttcaggtccctgcagacttcggttttgacctgtggggaaagtagacttcctcgaactggggaagccacatgttgtacatccttctataaactatgattatcattcttagtaggaaaatatgtgatttctttttttttttttttttttaaagtaagcatcaaatatttgaccaaccagttgggcagagaatatactgaaactttttatataacctcatccaaatgtcccctgcatttaagaaatgaaattcttctaattgcgtttataaattgtaaattatattgcatttagaaattaaaattctttttcttaatttgttttcaaggtgttctttgcagaagatgtgggttcaaacaaaggtgcaatcattggactcatggtgggcggtgttgtcatagcgacagtgatcgtcatcaccttggtgatgctgaagaagaaacagtacacatccattcatcatggtgtggtggaggtaggtaaacttgactgcatgtttccaagtgggaattaagactatgagagaattaggcttagctttttgctaagaactagctaagtatctcttttaaaaaacgaatcagtgtgcttccatgatgcttgggttacagttgttctttcttgttttggttttcattcattgcaacttaccgtgaatattctgctcaaggtattgagagtgtgtgttgttatctcaacttacaatttgtgttgaagttatcaaaataatacaaatgataatgcatgactttaaaaaagcatgattactcttagacttttttttttcaaacacaagcaacaaaaaccagtacaagaagttaaaaataaaaatagaagtaggaagttgctttttccaaaaaaactaaacatgtttattcttggatttcttttgtcttaaatagtctggcctctcaatacaaccaggtaatagtaaataatgtgacttttcagtgcagactcttacctttaaagtttctcaggaaatcacactataccaaatggcccaccaaaacatacatgattgttatttgagagttctgcaacctattaccctgcacttccacctgaaatatcttagtttcaaggtgctatactaaaacaagaaagagagaaagaaaatttacgaataagttatttttatgcatttgaaatgccatttggatgggggaaaaagtgttaaaatctcacagtatatgcaactttttaggaaactgtcttgcagagagtatagtgtaaacataacttttatatgcacagggaaactgaaaaatttgtgtgacatttaattgcgatattttaagagttatggaatttttagagctgaaagatttattgatgatgaccaatcaaattgatcttctcatcttgtagatgagggaactgaggccgagacagaagggttcaaattatgcaaggtcaagctcagagtccagatttcccctcatattccccattgctttttttttttttttttgagacagtctcgcgctgttgcccaggctggatcttggctcactgcaacctctgcctcctgggttcaagcaattctcttgtctcagcttcctgagtagctgggactatgggcacacgccaccatgcccggctaatttttgtttttagtagagacagggtttcaccatattggtcaggctggtctcgaactcctgacctcaggtgatccacccgccttggcttcccaaagtgctgggattacaggcgtgagccaccgcgtctggcccccattgctttttccatcagagaaaagtccaggtgtttctagggagttgaagattccactatccccaaggaaatgggctctaaaccattcttgattagaagaggacaggcagagtttaaataaatgaaatttgtggtgaagccagaaatttcattttgctcagcaattaaaacctctgcagactacaacagaagctgctgatggaaattggggtggagcctcatttccccattcatactgacgtggatgagcagtgtgaggaaggaaaccaagagaacagcaggcagcagggtggaaaggaacggactgacccatagatcagagtgtgagcacataaaagcaatgaccccactgtcatgtttggccattgcaccttttgtgatagtatctaagcttatgtccctcaaaacagtgtaagataggttttcattagtatcagcttatttcatttctgctcaaattaatttttaaaaaaatttaattccatatttgagcaaataaagatgtcttcatacttgagtaattcaagaccccttttttgctgctgttgttgttttggtttttttcatggttttgttgttttcttttgttgttgttgtttctttgttttttgagatggagtcttgctctttcacccaggctggagtgcagtggcatgatctccgctcactgcaacctccacctcccaggttcaagcgattctcctacctcactctcagcctcctgagtaactgggattacaggggcataccaccacgcctggctaatttttgtatttttagtagagacagggttttgccatgttggccaggctggtcttgaattcctggcctcaagtgatccgccctccccaacctcccaaggtgctgggattacaggcatgagccaccatgcctggccttcaagagcactttttagtttatttaatataattctctttgttgccggtctgtccgttgaagttgccttctttgatgccagaggccaaagacttggcttcctcgggcttccataacaaagtaacacagatgggtggattaagcaacagaaatttaccctctcacatttctggagtgtaagatcaaggtatcagccaggttggttcctccccaggcatctctccttggtttgcagatgcctgtctgctccctgtatcttcacatgaccttcactctgtttttctgctgtgtcctaacctcttcctacaaggacaccagtcatagtggattaggatcaaccctgatgaccttgtttaactttaataacctcttcgaccctatctgcaaatacagtcacaggtggaggtactggcagcttaggacttcaacatatgaattctagggggacacgttttagcccgtaacagaccccagtgatgctgagcataaaagcaaggcctccacctggagctccttcccctggctgtgcgtgagaccaggtcctacctcagacctaaggaaaaagaatccccaaataggaggctgcgaatctgagtgttgaaaatttccccaaatgaatgagatgtgcagtcggatttgagaatccctgacacatcattttaacactccttccttttagttctccgcgcaagcctcagggagtggaaaatggtatctctcacctcccagataaccggttgccttttaagtgctcttccagctgcctgaattaaaacgctctttttttagtcagtttaccaagcagtgtctcattggacttaaaatgtcagaggagaagttgacactttgacccagattctgacattaatttttaagccaggaggtatccttgcaggagcaaaatcgggaaggatggctgttcagctcttctctcctcattttgctgtctactggagagcaactggaagcctttctagatgaggggctccacctcattcgtgtttgttttgtttatttcctctcagctccttcccctcaagacctttgtgactgtccttcctgaaagcagccctctgtgcagccccatagtgtgtctgtacagcaatgttgaaatagaccacattccgcttttctgtcctcaaaaaagatgtagtttagctgggatggtagaacctgaacacagggagttgcaacccagcctaggcatgttcccaggtgagagagcacggtgggctttcagagcaccatttttcttagcattccagcgtctgcacccacagaagtgatgcttctgcaacatcctcttcctaccttaacaggcactctcaccctcaagtacatggaaatacctttatttccggctctggctaaccttcattaatcagtaaccctacttcagtaagaacaaaaatgagtacatcaatatttccagttggactcacctcagtcactcaggacagaataccattgtacttacataccatcgtgcctgaagaagtcatgatgaaagctttggtttccaggagattttttgtttttagagtgaaaaatgcccgcagaagatcacagagataggaaccctaggaaaaaaactcctgagaacaaatgtataaatgaaacaagcctagaacagtcacataccacttcacactggagagaacgttctgagaaatgtggcatggggcggtttgatcgctgtgcaaacatcataaagtacatgtacataaatctagatggtatagcctgctacacacctgggctacacacctacaactattgctcctaggctccacacctgtgcagcatattgctgcactgaatactatagacagttgtaacacactggcagggatttgcgtatctaaacaaactagaaaaggtacagtaaaaaatacggtattatggggccaccatcatatgtttggtctgtcgtggactaaaatgtcattatgtggcccataactgtatttttattggtagagttgttagcatttggaaatgagcacttgctagttgttgtttttttttttttttttttttttcaaataagcaggaaatattgacttactgaatttacttagccataaggccagagagtcactctgtgagccattggccacgctttcccaaggaggtaactgtgccttattggtgcttcaagcagtgaagcaatagccctttattattaccactccccaaatgtgccctccatgtcagaatagccctctggtggctggaaatctcagcactagctgaattaaccaccttgctcctgttttaggacgttcctgcaaagcccactaatcccaggatctgtttagtagcaagcggtacttttctacattcacatacatagacactggatatttaaaaatacgtattgtagctctttctgctactctccccagacatgtcacctttaataaggagaagttgggggcacagcttctctttattataggatgtgaaaaagttttcctctcacagatctgatcacttgaacaccagaagtctccccgcccccacctcctggttatctcattaatgatctaaataagaagagagttccttttatttggcttttatggaggtatggcatatgactttttctaagtaatatgctgtcacactggtgactgtataaaaagatgtccttagaggtcctttcttcccggccagaagctgacccaccaggatacagacgcactgacgttggcattgtagagtagttggagagagtggtcaggttgaatggaaagccacgataaggaaaagtgagggggggtgcagaacctaggagtggcttacagtgagcagcaggaagagaaattggaagatcaaaggaaagcatcaaaaatgatcacaggccaggcgtggtggctcacacctgtaatcccagcatttggggaggccaaggcaggtggatcacttgaggctaggagttcgagtccagcctggccaacatggtgagaccctgtctctaataaaaatacaaaaaattagccaggcgtggtggcatgcgcctgtagtcgcagctactcaggaggctgaggcaggagaatcgcttgaacccaggagatggaggctgcagtgagccaaaatcacgccactgcactccagcctgggtgacagagcaagactgtcttaaaaaaaaaaaaaattatgaagggatagcaaaggagttcctgaacctgcctgaagaattgcttgatgttggccataaacatagtcaactgccttctagttatatataactatagagagatggcatcaaaattaggaaaacaagcatctatacaactaggtagcaggcagttactgggaggttacgagggataagtcactagcttgaaaacttcctattttctttgcttttattttttttttccgcagacttgtggctcctttgatgtgtcacactattgttgtattgttcgccttagttcccttaccctcctttactcgtctggtccatctcaatgacaggattctgtcgtttggcctgactcagtcccttgtataaaaggacatctattaatccacatcctgctggttactgtacataataaaatgtaaacgtggtgtttcctgcctctcctccaagctcacacacccgcatgtaaatactctaggggcaataggaggagacctagaaactaaggtcacccaaatagaatcttgtccctgcaggcggatagctgagctctaaattactctggatacagtgaaggactaaatggttccaatgaatcaagttcagggagaaaagggtcagggggtatggaggttagccaaagagtgtcaaacgttctcctcaaagctattttagaacaaggctggtcaggctatttgggctcagctcttttcagcgtgtgtcataggcagcagccagttgaagccatgccaccatgcagtgcaggggtccaggtctcaggaaggtgcagcgtaccgagagtcacatgaagacctcagatcatttcctgctgctgtgtaatccaggcagtctgggaagagaatgaatattcagtggttgtatgtatgtgtgtcttcatcccagcaagtgacagatgttcctgcccagttggaaaatggaaattctgacttcattgtcttatcattccttccagaacaagcaccatgggctcaaaccctccctggctctgctttaagggaaataatattgtgtctgtgcagaggccctgtctgcacagggtcgtggtagggctggccttcacatggtggcccatgccactgctgtagcttagccatgaggaagagattggtgagcctgctggagaggaaggctacccttacttggtgctcctcctttatccatagacatgagtactcagattttcgcatctagctttcaaggggctggagattaaagatccaatccatactccttggatgcccttttgtcaagataatcccttcttctgtagctcctaagccctctaaggtctgagggccaagctgccccatggcaggaatggcaaaatgtagctgtcctctcagtggcaaaaggtaataggattatcaagtagcaaaacagaagccaagaaaagacaggagagttagaggtctggattgtgcaccagccttggagcctcgcatctctagcagggcactcttaagcgttaggctttggagtttgaagaggagataaacctatcaaattgccaggtgttcccctgcccttgatgcatgcaaatgattgttgacagccagtgtgatggtagatgtgcctcctggaagaaataaaagtataatattccaacaatcaagcagcattgtggcttttttctacaatcagaaacatagcagctttgtgcttgatctcctaagcaagataattttttttaacctgggcattctttgagttctcagtttcgaggtgatggggagcaaaaatgatgcccaagttcaaatggcgtactgctgcagataggctgtctcctggcacacagatttacagagtgaatgaaatctctcattattggtgctaatctttaaccatggtttttaacttacaagttggaggctaattacacagttaccagttaaagccaggtgacctcatttgttgacaacagtgcacagcaaaggaaagaggagaggataaggaaaatatctgtgatttgctcccagaaggacagtgaagctgagcatccatttgagcagagtcctctgagtactggccttggtcagagcttgttggtgggagtgtgctaaggggagatgcctaggtctgtcattggagtaagctgagggtttggatgcaggggaactcaggcagctctgagccacagggtggtagatgggagggattcacagtggcgcacagtctcttccataaatggaaacgtaagaatcggggcacatggccatggcggctcatgcctgtagtcctagtgctactttaggaggccgaggtaggcggatcacctgaggtcagtttgagaccagcatggccaacatggtgaaaccccatctctactaaaaatacaaaaattagccaggcgtagtggcgggtgcctgtaatcccagctactcgggaggctgaggcaggagaatcacttgaacctgggaggcagaggttgcagtgagccgagattgcctgggcaacaagagcaagactccaactcaaaaaaaatgggcacataatggatggaacattctgtcccaagggatgagggagctgtatatctacctattccagctgccttgggattagccactggtagtcattccacctcactcccagactgaaaagagtcaatcacttcatgaagtggggctatccgaagggaccacaggggacctgattatactgacagatttatttttatttatttactttttttgagacagagtctccctctgttgcccaggccggagtgcagtggcacgatcttggctcactgcagcctcagcctcctgggttcaagcagttcttctgcctcagcctctggagtagctgggactacaggcacgtgctactgtgcctggctaaatttttttgtatttttgttaaagatggggtttcactatgttggccaggcgtgtctcaaactcccgacctcgtgatccacccgccttggcctcccaaaagggctgggattttgagccacctcacctggccttttttttcttggagatggagtctcactctgtctcccaggctggagtgcagtggcacaatcttggctcactgcaaactccaccccccaagttcaagccattctcctgcctccgcctgtggagcagctgggattacaggcgtgcaccaccacgcctggctaatttttgtatttttagtagagacaaggtttcaccatgttggccaggctggtctcaaactcctgacctcaagtgacgcacccacctcaggctcccaaagtgctgggattacaggagtgagccactgcacccggccatattgacagatcttttagtctgaattgttatcagccagtgtggtctagtcatgacatatctagctccatctcgagacctcatgtcttactgctgacactacatcctcgctggtactttttcttccttggcttcaggggcattgctgtgtaggctcagatccatgccagatggggtgtgtagggggaaaagctgcataagggaggaatgtcacttggcaacactcaacaagggggaatgggcctgcagtattctcccagagatgaatgagcagcccattctaggaaatatccctttgaaggaatatcttctctatggtacatccaaacttttctctggaaaacatgcctcttcattctgatgactttctatttattctcttcatcttaccatggttttacaaaagaggaattttaacatactcattcagcagagttaaggacctcctctcttctgcgaacggggagaggtataacaaatatagtaaaacaagaacagccactgcccacgttgtaggggtaagtaccctgcccaacctgcagacagtaaatgccacacacagctctaacagtgacagggggagaaaaacgtcttcagttactggcctgaccttagaggtaaagcaacatattaacagagagggtctgattttaaactttgagctgaacatacttctatagtatcttaattctcagtttttaaaaaattacatcatctagaatggcgtcgtccttgctcttccttttttcttgtgccaaataatagccccctttggtatatgttattgttttaattgattctcaaacctctccttaacattttaacaaacataaaatttgatagaaatgggctagactaaattcagcagtccaggaaatcgagtatttttctacacagatttgagtgtcacccaagatacagtatactttgctgaatctccctccatgatactcttgtggttttatctattttaccaaaacacttccacgtaaaacaggcttccgttgactctgtttgtcctttatggacccaacaggggaggaaaaaataccattgcactgggtttatccacttactgtggagttggggaaccagaaacaaccactggacacgttgcaagcgcgtcaaggtttccaccgccacctggtggctagatggagcacagcatctgtgtaactggtgggcaaaggcgttctgctccaagatgtcaaagtgggggagaaaattatgggtgttctgcaatcttggcaaaagaagagtactgtactccttatctttttactgcttctccatgttcacccttaaaagattgatttttattttttactcagctctcctcttgtttttcaggttgacgccgctgtcaccccagaggagcgccacctgtccaagatgcagcagaacggctacgaaaatccaacctacaagttctttgagcagatgcagaactagacccccgccacagcagcctctgaagttggacagcaaaaccattgcttcactacccatcggtgtccatttatagaataatgtgggaagaaacaaacccgttttatgatttactcattatcgccttttgacagctgtgctgtaacacaagtagatgcctgaacttgaattaatccacacatcagtaatgtattctatctctctttacattttggtctctatactacattattaatgggttttgtgtactgtaaagaatttagctgtatcaaactagtgcatgaatagattctctcctgattatttatcacatagccccttagccagttgtatattattcttgtggtttgtgacccaattaagtcctactttacatatgctttaagaatcgatgggggatgcttcatgtgaacgtgggagttcagctgcttctcttgcctaagtattcctttcctgatcactatgcattttaaagttaaacatttttaagtatttcagatgctttagagagattttttttccatgactgcattttactgtacagattgctgcttctgctatatttgtgatataggaattaagaggatacacacgtttgtttcttcgtgcctgttttatgtgcacacattaggcattgagacttcaagcttttctttttttgtccacgtatctttgggtctttgataaagaaaagaatccctgttcattgtaagcacttttacggggcgggtggggaggggtgctctgctggtcttcaattaccaagaattctccaaaacaattttctgcaggatgattgtacagaatcattgcttatgacatgatcgctttctacactgtattacataaataaattaaataaaataaccccgggcaagacttttctttgaaggatgactacagacattaaataatcgaagtaattttgggtggggagaagaggcagattcaattttctttaaccagtctgaagtttcatttatgatacaaaagaagatgaaaatggaagtggcaatataaggggatgaggaaggcatgcctggacaaacccttcttttaagatgtgtcttcaatttgtataaaatggtgttttcatgtaaataaatacattcttggaggagcaccattgtgctggtgtgaatgattccatagtaacaatcttgaccatttactgacgtacagaccagtgagaagtcttcgcatgttgggtacccacacctgttgtgtcttaattgcaagtctgagtaggaagttggggccaacatgtgtctcccagtgctgggaaaatatttcatagacctaatttacagtctttacttgatctaaaacattttgctgccatattttggccctcaagtttgtcccaaatgagagacaaagggaaaagttccagggaaataaaaattaagacagctgattatctgtaaagcatggtttctcatcctgaacgctactaacattttgcagggaataattccttgttgaagggagttgtcctgaccagtgtaggatatttatttattttatttatgttttttgagagtctcgctctgtcacccaggctggagtgcagtggcacaatctcggctcactgcactccagcctgggagacagacgagactccgtctcaataaataaataaataaataaataaataaataaaaggagggcctggcacgaatgacatgcagggaaggcagtgagcaggtggaggtccctgtactcgttgtggtgccttatctaccaggcggttgagttgacgtctttgtggacagaattcgattacaaaggtgtccgaaagtctccaggtgggggagagttttgtagcgggcataatttgggttgtaaattgactgttgtctcctgagcagtctcctggtgagggagagtttcactggagctttgaaacacatgttagacagccttgccctgtagggagtgtctcgtgaaggagaggtaaacaattataattgcatttctaaagggctaagtaggacatgggaaactggaaaatggagaaaagaagagaaaaaaatagtaactcattctctttttcttagaaaaatgaggatacttggtcacatcctcacatggtgaagaataagatggtctcttcatttcccttcaacactagtcccatcgtgaggctctgccctcatgacctaatctaatcctaactgcctcccaaaggtcccacctccacatcccattattggggattagggtttcaacatagggatttgggggaaacacaaacactcagttcatagtgatatctgactgcgattccaaaggtctgaggacacattggccctgttgtttttgctgtgttgtccttggcctcaggtgaacattttagctttagattgcaacattttaagctaaaaacactaagctagaaaattaaacttatctcgtcacattctgcatggtgaacaaactcaaaactcacctgagtgtatcttgttttcatgagaaaaaatgaccggtcatctcccttgccctgttagggacagttagacatgactgctgtatgaagatatgtacatgttaacaattcatatgtacaagctactgttccattttgcctggcccaaggggaggtagctagctagttggggtagcagggcgaattaaccctaatataatagtacatttctaatgccaccaatgaaatgaaaaccagctctcaaacatggcactatatgggatggcattccaaggccaactcagttacagtaactacagctttaactttgatcattttgttaccagaaaggggtcccaatccagaccccaagacagggttcttggatctcatgcaagaaagaattcaaggcgggtccatagaggaaaaggaaatgaagttttaaagaaagtaggaaaataaagagtggttgctccataggcagagtgaacctaagggctgctggttgcccattttattgttatttcttaattatttactaaacaagggctgaattattcatgcctccccttggtagaccatatagggtaacttcctgatgttgccatggcatttgtaaaccgtcatggctctagtgggagtgtagcagtgaggacaaccagaggtcactctcattgctatcttggttttggtgggttttgaccggcttctttactgcaacttgttttatgagcaaggtctttatgacctgtatcttatgcagacctacaatctcatcctgtgacttagaatgacttaaccctctgggaatgcagcccagtaggtcccagccttattttacccagcccctattcaaaatggagttgctctggttcagacgcctctgacaattttaaagctaatgaaaaaaatgtctagccaaatgtatatatacatacatatataattatgaaaagataatgccttataatcttgattcttaaattgaggtatattgatagtattctcccaatggtctggggattaatcaataggtaatttatacaaaactgaagtgctgccaaatagaattataggagtagctgctgcgcaaaaaagattaatgagatttggggagactttgctgtggctaatatgatgggtcaggaagagtacaatctcagtacaattttaagttgtatttatcttatgaataattgggctattctttcatatgcccaagggccattttatagctctatatt

SEQ ID NO: 70 - DNA, 3543 bp, synthetic construct
  source 1..3543: mol_type = other DNA
cgccgcgctcgggctccgtcagtttcctcggcagcggtaggcgagagcacgcggaggagcgtgcgcgggggccccgggagacggcggcggtggcggcgcgggcagagcaaggacgcggcggatcccactcgcacagcagcgcactcggtgccccgcgcagggtcgcgatgctgcccggtttggcactgctcctgctggccgcctggacggctcgggcgctggaggtacccactgatggtaatgctggcctgctggctgaaccccagattgccatgttctgtggcagactgaacatgcacatgaatgtccagaatgggaagtgggattcagatccatcagggaccaaaacctgcattgataccaaggaaggcatcctgcagtattgccaagaagtctaccctgaactgcagatcaccaatgtggtagaagccaaccaaccagtgaccatccagaactggtgcaagcggggccgcaagcagtgcaagacccatccccactttgtgattccctaccgctgcttagttggtgagtttgtaagtgatgcccttctcgttcctgacaagtgcaaattcttacaccaggagaggatggatgtttgcgaaactcatcttcactggcacaccgtcgccaaagagacatgcagtgagaagagtaccaacttgcatgactacggcatgttgctgccctgcggaattgacaagttccgaggggtagagtttgtgtgttgcccactggctgaagaaagtgacaatgtggattctgctgatgcggaggaggatgactcggatgtctggtggggcggagcagacacagactatgcagatgggagtgaagacaaagtagtagaagtagcagaggaggaagaagtggctgaggtggaagaagaagaagccgatgatgacgaggacgatgaggatggtgatgaggtagaggaagaggctgaggaaccctacgaagaagccacagagagaaccaccagcattgccaccaccaccaccaccaccacagagtctgtggaagaggtggttcgagaggtgtgctctgaacaagccgagacggggccgtgccgagcaatgatctcccgctggtactttgatgtgactgaagggaagtgtgccccattcttttacggcggatgtggcggcaaccggaacaactttgacacagaagagtactgcatggccgtgtgtggcagcgccattcctacaacagcagccagtacccctgatgccgttgacaagtatctcgagacacctggggatgagaatgaacatgcccatttccagaaagccaaagagaggcttgaggccaagcaccgagagagaatgtcccaggtcatgagagaatgggaagaggcagaacgtcaagcaaagaacttgcctaaagctgataagaaggcagttatccagcatttccaggagaaagtggaatctttggaacaggaagcagccaacgagagacagcagctggtggagacacacatggccagagtggaagccatgctcaatgaccgccgccgcctggccctggagaactacatcaccgctctgcaggctgttcctcctcggcctcgtcacgtgttcaatatgctaaagaagtatgtccgcgcagaacagaaggacagacagcacaccctaaagcatttcgagcatgtgcgcatggtggatcccaagaaagccgctcagatccggtcccaggttatgacacacctccgtgtgatttatgagcgcatgaatcagtctctctccctgctctacaacgtgcctgcagtggccgaggagattcaggatgaagttgatgagctgcttcagaaagagcaaaactattcagatgacgtcttggccaacatgattagtgaaccaaggatcagttacggaaacgatgctctcatgccatctttgaccgaaacgaaaaccaccgtggagctccttcccgtgaatggagagttcagcctggacgatctccagccgtggcattcttttggggctgactctgtgccagccaacacagaaaacgaagttgagcctgttgatgcccgccctgctgccgaccgaggactgaccactcgaccaggttctgggttgacaaatatcaagacggaggagatctctgaagtgaagatggatgcagaattccgacatgactcaggatatgaagttcatcatcaaaaattggtgttctttgcagaagatgtgggttcaaacaaaggtgcaatcattggactcatggtgggcggtgttgtcatagcgacagtgatcgtcatcaccttggtgatgctgaagaagaaacagtacacatccattcatcatggtgtggtggaggttgacgccgctgtcaccccagaggagcgccacctgtccaagatgcagcagaacggctacgaaaatccaacctacaagttctttgagcagatgcagaactagacccccgccacagcagcctctgaagttggacagcaaaaccattgcttcactacccatcggtgtccatttatagaataatgtgggaagaaacaaacccgttttatgatttactcattatcgccttttgacagctgtgctgtaacacaagtagatgcctgaacttgaattaatccacacatcagtaatgtattctatctctctttacattttggtctctatactacattattaatgggttttgtgtactgtaaagaatttagctgtatcaaactagtgcatgaatagattctctcctgattatttatcacatagccccttagccagttgtatattattcttgtggtttgtgacccaattaagtcctactttacatatgctttaagaatcgatgggggatgcttcatgtgaacgtgggagttcagctgcttctcttgcctaagtattcctttcctgatcactatgcattttaaagttaaacatttttaagtatttcagatgctttagagagattttttttccatgactgcattttactgtacagattgctgcttctgctatatttgtgatataggaattaagaggatacacacgtttgtttcttcgtgcctgttttatgtgcacacattaggcattgagacttcaagcttttctttttttgtccacgtatctttgggtctttgataaagaaaagaatccctgttcattgtaagcacttttacggggcgggtggggaggggtgctctgctggtcttcaattaccaagaattctccaaaacaattttctgcaggatgattgtacagaatcattgcttatgacatgatcgctttctacactgtattacataaataaattaaataaaataaccccgggcaagacttttctttgaaggatgactacagacattaaataatcgaagtaattttgggtggggagaagaggcagattcaattttctttaaccagtctgaagtttcatttatgatacaaaagaagatgaaaatggaagtggcaatataaggggatgaggaaggcatgcctggacaaacccttcttttaagatgtgtcttcaatttgtataaaatggtgttttcatgtaaataaatacattcttggaggagca

SEQ ID NO: 71 - DNA, 3355 bp, synthetic construct
  source 1..3355: mol_type = other DNA
agtttcctcggcagcggtaggcgagagcacgcggaggagcgtgcgcgggggccccgggagacggcggcggtggcggcgcgggcagagcaaggacgcggcggatcccactcgcacagcagcgcactcggtgccccgcgcagggtcgcgatgctgcccggtttggcactgctcctgctggccgcctggacggctcgggcgctggaggtacccactgatggtaatgctggcctgctggctgaaccccagattgccatgttctgtggcagactgaacatgcacatgaatgtccagaatgggaagtgggattcagatccatcagggaccaaaacctgcattgataccaaggaaggcatcctgcagtattgccaagaagtctaccctgaactgcagatcaccaatgtggtagaagccaaccaaccagtgaccatccagaactggtgcaagcggggccgcaagcagtgcaagacccatccccactttgtgattccctaccgctgcttagttggtgagtttgtaagtgatgcccttctcgttcctgacaagtgcaaattcttacaccaggagaggatggatgtttgcgaaactcatcttcactggcacaccgtcgccaaagagacatgcagtgagaagagtaccaacttgcatgactacggcatgttgctgccctgcggaattgacaagttccgaggggtagagtttgtgtgttgcccactggctgaagaaagtgacaatgtggattctgctgatgcggaggaggatgactcggatgtctggtggggcggagcagacacagactatgcagatgggagtgaagacaaagtagtagaagtagcagaggaggaagaagtggctgaggtggaagaagaagaagccgatgatgacgaggacgatgaggatggtgatgaggtagaggaagaggctgaggaaccctacgaagaagccacagagagaaccaccagcattgccaccaccaccaccaccaccacagagtctgtggaagaggtggttcgagttcctacaacagcagccagtacccctgatgccgttgacaagtatctcgagacacctggggatgagaatgaacatgcccatttccagaaagccaaagagaggcttgaggccaagcaccgagagagaatgtcccaggtcatgagagaatgggaagaggcagaacgtcaagcaaagaacttgcctaaagctgataagaaggcagttatccagcatttccaggagaaagtggaatctttggaacaggaagcagccaacgagagacagcagctggtggagacacacatggccagagtggaagccatgctcaatgaccgccgccgcctggccctggagaactacatcaccgctctgcaggctgttcctcctcggcctcgtcacgtgttcaatatgctaaagaagtatgtccgcgcagaacagaaggacagacagcacaccctaaagcatttcgagcatgtgcgcatggtggatcccaagaaagccgctcagatccggtcccaggttatgacacacctccgtgtgatttatgagcgcatgaatcagtctctctccctgctctacaacgtgcctgcagtggccgaggagattcaggatgaagttgatgagctgcttcagaaagagcaaaactattcagatgacgtcttggccaacatgattagtgaaccaaggatcagttacggaaacgatgctctcatgccatctttgaccgaaacgaaaaccaccgtggagctccttcccgtgaatggagagttcagcctggacgatctccagccgtggcattcttttggggctgactctgtgccagccaacacagaaaacgaagttgagcctgttgatgcccgccctgctgccgaccgaggactgaccactcgaccaggttctgggttgacaaatatcaagacggaggagatctctgaagtgaagatggatgcagaattccgacatgactcaggatatgaagttcatcatcaaaaattggtgttctttgcagaagatgtgggttcaaacaaaggtgcaatcattggactcatggtgggcggtgttgtcatagcgacagtgatcgtcatcaccttggtgatgctgaagaagaaacagtacacatccattcatcatggtgtggtggaggttgacgccgctgtcaccccagaggagcgccacctgtccaagatgcagcagaacggctacgaaaatccaacctacaagttctttgagcagatgcagaactagacccccgccacagcagcctctgaagttggacagcaaaaccattgcttcactacccatcggtgtccatttatagaataatgtgggaagaaacaaacccgttttatgatttactcattatcgccttttgacagctgtgctgtaacacaagtagatgcctgaacttgaattaatccacacatcagtaatgtattctatctctctttacattttggtctctatactacattattaatgggttttgtgtactgtaaagaatttagctgtatcaaactagtgcatgaatagattctctcctgattatttatcacatagccccttagccagttgtatattattcttgtggtttgtgacccaattaagtcctactttacatatgctttaagaatcgatgggggatgcttcatgtgaacgtgggagttcagctgcttctcttgcctaagtattcctttcctgatcactatgcattttaaagttaaacatttttaagtatttcagatgctttagagagattttttttccatgactgcattttactgtacagattgctgcttctgctatatttgtgatataggaattaagaggatacacacgtttgtttcttcgtgcctgttttatgtgcacacattaggcattgagacttcaagcttttctttttttgtccacgtatctttgggtctttgataaagaaaagaatccctgttcattgtaagcacttttacggggcgggtggggaggggtgctctgctggtcttcaattaccaagaattctccaaaacaattttctgcaggatgattgtacagaatcattgcttatgacatgatcgctttctacactgtattacataaataaattaaataaaataaccccgggcaagacttttctttgaaggatgactacagacattaaataatcgaagtaattttgggtggggagaagaggcagattcaattttctttaaccagtctgaagtttcatttatgatacaaaagaagatgaaaatggaagtggcaatataaggggatgaggaaggcatgcctggacaaacccttcttttaagatgtgtcttcaatttgtataaaatggtgttttcatgtaaataaatacattcttggaggagca

SEQ ID NO: 72 - DNA, 2846 bp, synthetic construct
  source 1..2846: mol_type = other DNA
agagttccggaggctttggttgtccattgttagcttagaagttggcgcagtgtgcgtgtgatccacgcctaaatagcacagccttgctgtgcgtggtagaagttgggttagtgttgacatgctgttgactcaccctcccgaggatggaagctctggcctgggtcaagttgtggtcactgcagttaacagtttgttgatctcagggagtattccacagttgctgatgtaattgacaatgattggagccagctcttccccagattcaaatggaccaattagaggacttgttggttctgtttatcaactatgtacccactgatggtaatgctggcctgctggctgaaccccagattgccatgttctgtggcagactgaacatgcacatgaatgtccagaatgggaagtgggattcagatccatcagggaccaaaacctgcattgataccaaggaaggcatcctgcagtattgccaagaagtctaccctgaactgcagatcaccaatgtggtagaagccaaccaaccagtgaccatccagaactggtgcaagcggggccgcaagcagtgcaagacccatccccactttgtgattccctaccgctgcttagttggtgagtttgtaagtgatgcccttctcgttcctgacaagtgcaaattcttacaccaggagaggatggatgtttgcgaaactcatcttcactggcacaccgtcgccaaagagacatgcagtgagaagagtaccaacttgcatgactacggcatgttgctgccctgcggaattgacaagttccgaggggtagagtttgtgtgttgcccactggctgaagaaagtgacaatgtggattctgctgatgcggaggaggatgactcggatgtctggtggggcggagcagacacagactatgcagatgggagtgaagacaaagtagtagaagtagcagaggaggaagaagtggctgaggtggaagaagaagaagccgatgatgacgaggacgatgaggatggtgatgaggtagaggaagaggctgaggaaccctacgaagaagccacagagagaaccaccagcattgccaccaccaccaccaccaccacagagtctgtggaagaggtggttcgagaggtgtgctctgaacaagccgagacggggccgtgccgagcaatgatctcccgctggtactttgatgtgactgaagggaagtgtgccccattcttttacggcggatgtggcggcaaccggaacaactttgacacagaagagtactgcatggccgtgtgtggcagcgccattcctacaacagcagccagtacccctgatgccgttgacaagtatctcgagacacctggggatgagaatgaacatgcccatttccagaaagccaaagagaggcttgaggccaagcaccgagagagaatgtcccaggtcatgagagaatgggaagaggcagaacgtcaagcaaagaacttgcctaaagctgataagaaggcagttatccagcatttccaggagaaagtggaatctttggaacaggaagcagccaacgagagacagcagctggtggagacacacatggccagagtggaagccatgctcaatgaccgccgccgcctggccctggagaactacatcaccgctctgcaggctgttcctcctcggcctcgtcacgtgttcaatatgctaaagaagtatgtccgcgcagaacagaaggacagacagcacaccctaaagcatttcgagcatgtgcgcatggtggatcccaagaaagccgctcagatccggtcccaggttatgacacacctccgtgtgatttatgagcgcatgaatcagtctctctccctgctctacaacgtgcctgcagtggccgaggagattcaggatgaagttgatgagctgcttcagaaagagcaaaactattcagatgacgtcttggccaacatgattagtgaaccaaggatcagttacggaaacgatgctctcatgccatctttgaccgaaacgaaaaccaccgtggagctccttcccgtgaatggagagttcagcctggacgatctccagccgtggcattcttttggggctgactctgtgccagccaacacagaaaacgaagttgagcctgttgatgcccgccctgctgccgaccgaggactgaccactcgaccaggttctgggttgacaaatatcaagacggaggagatctctgaagtgaagatggatgcagaattccgacatgactcaggatatgaagttcatcatcaaaaattggtgttctttgcagaagatgtgggttcaaacaaaggtgcaatcattggactcatggtgggcggtgttgtcatagcgacagtgatcgtcatcaccttggtgatgctgaagaagaaacagtacacatccattcatcatggtgtggtggaggttgacgccgctgtcaccccagaggagcgccacctgtccaagatgcagcagaacggctacgaaaatccaacctacaagttctttgagcagatgcagaactagacccccgccacagcagcctctgaagttggacagcaaaaccattgcttcactacccatcggtgtccatttatagaataatgtgggaagaaacaaacccgttttatgatttactcattatcgccttttgacagctgtgctgtaacacaagtagatgcctgaacttgaattaatccacacatcagtaatgtattctatctctctttacattttggtctctatactacattattaatgggttttgtgtactgtaaagaatttagctgtatcaaactagtgcatgaatagattctctcctgattatttatcacatagccccttagccagttgtatattattctt

SEQ ID NO: 73 - DNA, 3167 bp, synthetic construct
  source 1..3167: mol_type = other DNA
gcgagagcacgcggaggagcgtgcgcgggggccccgggagacggcggcggtggcggcgcgggcagagcaaggacgcggcggatcccactcgcacagcagcgcactcggtgccccgcgcagggtcgcgatgctgcccggtttggcactgctcctgctggccgcctggacggctcgggcgctggaggtctaccctgaactgcagatcaccaatgtggtagaagccaaccaaccagtgaccatccagaactggtgcaagcggggccgcaagcagtgcaagacccatccccactttgtgattccctaccgctgcttagttggtgagtttgtaagtgatgcccttctcgttcctgacaagtgcaaattcttacaccaggagaggatggatgtttgcgaaactcatcttcactggcacaccgtcgccaaagagacatgcagtgagaagagtaccaacttgcatgactacggcatgttgctgccctgcggaattgacaagttccgaggggtagagtttgtgtgttgcccactggctgaagaaagtgacaatgtggattctgctgatgcggaggaggatgactcggatgtctggtggggcggagcagacacagactatgcagatgggagtgaagacaaagtagtagaagtagcagaggaggaagaagtggctgaggtggaagaagaagaagccgatgatgacgaggacgatgaggatggtgatgaggtagaggaagaggctgaggaaccctacgaagaagccacagagagaaccaccagcattgccaccaccaccaccaccaccacagagtctgtggaagaggtggttcgagttcctacaacagcagccagtacccctgatgccgttgacaagtatctcgagacacctggggatgagaatgaacatgcccatttccagaaagccaaagagaggcttgaggccaagcaccgagagagaatgtcccaggtcatgagagaatgggaagaggcagaacgtcaagcaaagaacttgcctaaagctgataagaaggcagttatccagcatttccaggagaaagtggaatctttggaacaggaagcagccaacgagagacagcagctggtggagacacacatggccagagtggaagccatgctcaatgaccgccgccgcctggccctggagaactacatcaccgctctgcaggctgttcctcctcggcctcgtcacgtgttcaatatgctaaagaagtatgtccgcgcagaacagaaggacagacagcacaccctaaagcatttcgagcatgtgcgcatggtggatcccaagaaagccgctcagatccggtcccaggttatgacacacctccgtgtgatttatgagcgcatgaatcagtctctctccctgctctacaacgtgcctgcagtggccgaggagattcaggatgaagttgatgagctgcttcagaaagagcaaaactattcagatgacgtcttggccaacatgattagtgaaccaaggatcagttacggaaacgatgctctcatgccatctttgaccgaaacgaaaaccaccgtggagctccttcccgtgaatggagagttcagcctggacgatctccagccgtggcattcttttggggctgactctgtgccagccaacacagaaaacgaagttgagcctgttgatgcccgccctgctgccgaccgaggactgaccactcgaccaggttctgggttgacaaatatcaagacggaggagatctctgaagtgaagatggatgcagaattccgacatgactcaggatatgaagttcatcatcaaaaattggtgttctttgcagaagatgtgggttcaaacaaaggtgcaatcattggactcatggtgggcggtgttgtcatagcgacagtgatcgtcatcaccttggtgatgctgaagaagaaacagtacacatccattcatcatggtgtggtggaggttgacgccgctgtcaccccagaggagcgccacctgtccaagatgcagcagaacggctacgaaaatccaacctacaagttctttgagcagatgcagaactagacccccgccacagcagcctctgaagttggacagcaaaaccattgcttcactacccatcggtgtccatttatagaataatgtgggaagaaacaaacccgttttatgatttactcattatcgccttttgacagctgtgctgtaacacaagtagatgcctgaacttgaattaatccacacatcagtaatgtattctatctctctttacattttggtctctatactacattattaatgggttttgtgtactgtaaagaatttagctgtatcaaactagtgcatgaatagattctctcctgattatttatcacatagccccttagccagttgtatattattcttgtggtttgtgacccaattaagtcctactttacatatgctttaagaatcgatgggggatgcttcatgtgaacgtgggagttcagctgcttctcttgcctaagtattcctttcctgatcactatgcattttaaagttaaacatttttaagtatttcagatgctttagagagattttttttccatgactgcattttactgtacagattgctgcttctgctatatttgtgatataggaattaagaggatacacacgtttgtttcttcgtgcctgttttatgtgcacacattaggcattgagacttcaagcttttctttttttgtccacgtatctttgggtctttgataaagaaaagaatccctgttcattgtaagcacttttacggggcgggtggggaggggtgctctgctggtcttcaattaccaagaattctccaaaacaattttctgcaggatgattgtacagaatcattgcttatgacatgatcgctttctacactgtattacataaataaattaaataaaataaccccgggcaagacttttctttgaaggatgactacagacattaaataatcgaagtaattttgggtggggagaagaggcagattcaattttctttaaccagtctgaagtttcatttatgatacaaaagaagatgaaaatggaagtggcaatataaggggatgaggaaggcatgcctggacaaacccttcttttaagatgtgtcttcaatttgtataaaatggtgttttcatgtaaataaatacattcttggaggagca

SEQ ID NO: 74 - DNA, 2366 bp, synthetic construct
  source 1..2366: mol_type = other DNA
gatcccactcgcacagcagcgcactcggtgccccgcgcagggtcgcgatgctgcccggtttggcactgctcctgctggccgcctggacggctcgggcgctggaggtacccactgatggtaatgctggcctgctggctgaaccccagattgccatgttctgtggcagactgaacatgcacatgaatgtccagaatgggaagtgggattcagatccatcagggaccaaaacctgcattgataccaaggaaggcatcctgcagtattgccaagaagtctaccctgaactgcagatcaccaatgtggtagaagccaaccaaccagtgaccatccagaactggtgcaagcggggccgcaagcagtgcaagacccatccccactttgtgattccctaccgctgcttagttggtgagtttgtaagtgatgcccttctcgttcctgacaagtgcaaattcttacaccaggagaggatggatgtttgcgaaactcatcttcactggcacaccgtcgccaaagagacatgcagtgagaagagtaccaacttgcatgactacggcatgttgctgccctgcggaattgacaagttccgaggggtagagtttgtgtgttgcccactggctgaagaaagtgacaatgtggattctgctgatgcggaggaggatgactcggatgtctggtggggcggagcagacacagactatgcagatgggagtgaagacaaagtagtagaagtagcagaggaggaagaagtggctgaggtggaagaagaagaagccgatgatgacgaggacgatgaggatggtgatgaggtagaggaagaggctgaggaaccctacgaagaagccacagagagaaccaccagcattgccaccaccaccaccaccaccacagagtctgtggaagaggtggttcgagaggtgtgctctgaacaagccgagacggggccgtgccgagcaatgatctcccgctggtactttgatgtgactgaagggaagtgtgccccattcttttacggcggatgtggcggcaaccggaacaactttgacacagaagagtactgcatggccgtgtgtggcagcgccatgtcccaaagtttactcaagactacccaggaacctcttgcccgagatcctgttaaacttcctacaacagcagccagtacccctgatgccgttgacaagtatctcgagacacctggggatgagaatgaacatgcccatttccagaaagccaaagagaggcttgaggccaagcaccgagagagaatgtcccaggtcatgagagaatgggaagaggcagaacgtcaagcaaagaacttgcctaaagctgataagaaggcagttatccagcatttccaggagaaagtggaatctttggaacaggaagcagccaacgagagacagcagctggtggagacacacatggccagagtggaagccatgctcaatgaccgccgccgcctggccctggagaactacatcaccgctctgcaggctgttcctcctcggcctcgtcacgtgttcaatatgctaaagaagtatgtccgcgcagaacagaaggacagacagcacaccctaaagcatttcgagcatgtgcgcatggtggatcccaagaaagccgctcagatccggtcccaggttatgacacacctccgtgtgatttatgagcgcatgaatcagtctctctccctgctctacaacgtgcctgcagtggccgaggagattcaggatgaagttgatgagctgcttcagaaagagcaaaactattcagatgacgtcttggccaacatgattagtgaaccaaggatcagttacggaaacgatgctctcatgccatctttgaccgaaacgaaaaccaccgtggagctccttcccgtgaatggagagttcagcctggacgatctccagccgtggcattcttttggggctgactctgtgccagccaacacagaaaacgaaggttctgggttgacaaatatcaagacggaggagatctctgaagtgaagatggatgcagaattccgacatgactcaggatatgaagttcatcatcaaaaattggtgttctttgcagaagatgtgggttcaaacaaaggtgcaatcattggactcatggtgggcggtgttgtcatagcgacagtgatcgtcatcaccttggtgatgctgaagaagaaacagtacacatccattcatcatggtgtggtggaggttgacgccgctgtcaccccagaggagcgccacctgtccaagatgcagcagaacggctacgaaaatccaacctacaagttctttgagcagatgcagaactagacccccgccacagcagcctctgaagttggacagcaaaaccattgcttcactacccatcgg

SEQ ID NO: 75 - DNA, 2227000 bp, Homo sapiens
  source 1..2227000: mol_type = genomic DNA
acgtccggctaatttctgtatttttagtagagacggggtttcaccatgttagtcaggctggtctcaaactcctcacctaaggtgattcacctgcctcggcctcacaaagtgctgggattacaggcatgagccaccgtgcgtggcctgatttaagaaattttaaaagacgcaaataaatgggtgtatgttctgtgttcatggactagaaggattaatattgttaaaatgtccatgctactcaaagcaatttacagattcagcacaacctctatcaaaatgccaatagcatttttcatagatttaaaaaaaatctaaaattcaaatgaaacaacaaaagaaagagaatagccaaagcaatcttgagaaggataagcaacattggaggtatcacacttcctgattttgaattatatgacaaagctttagtaatcaaaataatatagtactggcataaaagcagacatatagaccaatgcaacagaatggagggcccataaataaacccattcatatatggtcaactaaattttgagaagggcaacaagagtacactatgaggaaaggatattctctttaataaatggtgtttgaaaaactggatatacacatgctaaagaataaaattggacccttacatcacacaacaaaagtcagctaaaaattgattaaagaattaaatgtaagacctgaaactacaaaattcctagaagaaagtgcatgaaaaaataaattctcgaaattggtcttggcaatgattttttagatatgacatgaaaagcacagacagtaaaatcaaaattaaacaagttgtactacggcaaaccataaaccttctgtacagcataggaaacaattaacagagtgaagagacaactgtggaatgggagaatatattagcaaaccatatgaccaatatgcagctttcatccaaaatatatgaggaactcagagctcaagcaaaacacacaaacaaaaaacaaaaaatctgattaaaaatggtcaaagcccctgaatagacagttctccaaagaagacatgcaaatggccaacaggtatatgaaaagattctcaaaagcgctaatcatcaaggaaatgcaaattaaagcaacagtgaaatatcacctcaaacttgttaggatggctattatcaaaaagataaaaaaaataacaagttttggcaagaatgtggataaaagggaatccttatacattgttggcgggaatgtaaatttgtatagccattatggaaaacagtatggagattcctcaaaaagttaaaatacgaatgccctaggatcaaattaccactcttttgggtatatataaaaaggaaatgaaatcagtatctagatgagatatctgcactcccatgttcagtgcagagttattcacaatagccaaggcatgaaaacaacctgagtgtacatcaacagataaattaataaagaaattgtgatatatgtaaatataatgaaataatatttagcctacaaaggaaggaaatcctgctatttgtgataatgtgggtgaacctgaagaacattacgctaagtgaaataagccaggcataggaagaataatactgcatgatctcacttacatgtaaaatctgaacagtcagctataaagaagcagagggtagattgattgttaccaagggcagagggagggggagaatgggaagatattggtcaaaggacacagagttttcattatcaggatgaataagttctagagatctaatgtgcaggataggggctatagttaataacactacagtatgcactaagagagtaatcttgagtgttatcaccaaatacacaaaaaaagggtaaccatgtaagaggatggatatgttaattacttttactgtagtaatcatttcactatatgtatattgaaacatgttgtacaacttgtatacatttttacaaaaaattaattttcacaagcctcaagacagacttatgaatagatgaaacagaatacggaaaatatctgaaacaggaaggagtccagcattttagaagaaaaaatagaagtccattgtggctggaataaagtataaagaggaagagaggcaagagtttaagctggagaggctagtagaagccaagaatacaacaaaaaaaacacatggcatttatgctattctcaatctctaaaatagatatgctaatcaccgaagactttttatgtaaaatagcagtaattgatataccagtattttcagagttgtgtggaatgatatgtatattattttagagaaatcttggtggattcatatggactcaacttatctttcaggtttatttcttgcatttataaattatatctaataaactataagttactgattgttgtgtatatcttgatatatagggattatttgtgtttgttatacaaaaatcaaatggaagtagaatagctaaaatgtatgagtacttgcacacaaagcacacacacacacacacacacacacacacaccataaccccttaggaaaacactatttcagaatagcgatattggcatatttcacatatgctaaatgagttattccttatagtttcataatgtaactatgaaaccagctgtctgtttactttttgtggtaggggggatagctttcctaacaaactaaatacctaatacaaatctgagaggaaacatatgattttattaatttttctcatgaaaacacttaaactttcttgtgttataatttcaaaccataagtgcccccaagacaggcaaacttggaagttttagagaaaattatacggtataattgataacaattacagtttcttttaacaaatactgattcacgattagtatttttaaaatacaaaatgcattttcctgaatagcatttatttacttgttaaagaagttgtgtaagagattcagctaatctaatttcttactttgtgaagaaatcactcatctaaagtcaaaatatcaagtataaagtctacccttgggagaagcatacagggtgccagactttaaatatctccagtgtgcaaaataaataatattttcttgaaatatcctcttatttgaaaatttgctatagagtcacaagaggcaaattccatttgagaaagtgcatgctatattttacaacgcagaaatgtggagctgagcacacaacatcttattgcaaaagtacaattcagaagagagtttttacccttaaaaggctgtgaagataagtaaaaatcagccaaaatttcagtgtgaataatatgatgtttggcgaggaactctactattgttacacttaggaaaataatctaatccaaaggctttgcatctgtacagaagagcgagtagatactgaaagagatttgcagatccactgttttttaggcaggaagaatgctcgttaaatgcaaacgctgctctggctcatgtgtttgctccgaggtataggttttgttcgactgacgtatcagatagtcagagtggttaccacaccgacgttgtagcagctgcataataaatgactgaaagaatcatgttaggcatgcccacctaacctaacttgaatcatgcgaaaggggagctgttggaattcaaatagactttctggttcccagcagtcggcagtaatagaatgctttcaggaagatgacagaatcaggagaaagatgctgttttgcactatcttgatttgttacagcagccaacttattggcatgatggagtgacaggaaaaacagctggcatggaaggtaggattattaaagctattacatcattacaaatacaattagaagctggccatgacaaagcatatgtttgaacaagcagctgttggtagctggggtttgttgccgagctcttcaaactctgcaaacagtgttgcttttacagaatggattttaaaattgccttgtgctgcgttagattttggggagggggtgtgcttgcctccaacctcaggaaaacacttctgggatagaaatcagtgttagaagattttagaataaagtattgttcaggagtctaggtttcttcaggtagatgatgacagggggaaaaaaatcttcggggaaatctaccccagattagttatatgcaatttagttgcaagaactgattgatgtattggcatattcagacagtgagagaaatgagaatgtacagaatgtttggataggttgaaaattgttatacttggtttctattttataaggagtttggctgtcagtcatttctcctcatcaatttctagcttttgacatttattcagtcattctgcattatatgaagaaaatatatcaatatctcctgcagggtttttcaacaactctagcatctgtttcagctattgaactgtattcacgttttgccaagttgatgtcgacccagctggtctatgatttctcgcttgattactgctcttaatttctctgtatcagcttgtttcagatagggctttgaaggctgttaatgaaaaatgacagaagtgataaattattgaaaatgtgagcatttatttatttatttatttatttatttatttattttgccctttaatgagttttgtcttacattctttcttgcctgcgtacgatttttagaaccctttctctgttttgcaatatttctttcccctacaatcagtggattataattataagtacttttaagcaaatggagcatgagcatggacagtatttggctccaaaaataaagtttttggagaaaggggagcaatttatgctttttgtataaactatgcatcgtttctataacctatcttcacatgctgtcatggggatctgtcagtgactgtaatcagactgaacatattgaaataatctttatcaccactagggtaacaagcaaataaaacattcaaacatttaacaagtgattgtttaaaacagatgttaaataatatagaaatagattttcctaagtgtgaaaagcctgattattaactgtctatgtaatacagaatctttcggctctctacccagtctcctccatagcctgaggagctaaatcatccaagttaatagactatcatatatgtacatctaatatgacctttcagtgtacacagtgctactcgtatgtgctgtgccttttctgtagtaattgtaatatcccagtcagtctggttaaggaacactattggctgttatgtaactttttttctgaatgttagtccatggttttcaattacgtattcctcttagaaagggtgagttaaaaacaacatgtatttaaatatcagtaaattaattagcaagtggtgggctaattacactaggatttctccaaaataattgctaacttctgttttgaaaaatagtcaaggatttggatgactactttttaaccttgaagcatacattaccgtggttgaatatcattcataattcatatatacagcaggaaagaaaatagttttctagatgtatcattttagcagcaaagaatttttttttataatgtggttcaggcactctgattatttccgtttaatacttttaagtactgtagatgcttttgtatagtgtgttacagaacttggttaatctttgggaagctcaaagactgacagaattttgcatccaaatgctacagggttattttgtggttggttgagaaaattcagctctgtctatactgttgtttaaaatacagccctctttggccaatgttacttttcaactttttataaccgttttaagtgaccattcaagactgtaaaaactcttttacactgcatctttagtaggactctccttttgtgaattgtctccttcgaaaaaatgtgagcttccttctagcctcactctcttgttaccatagttacttttaaaagaaggtttttctttttcaatgaagatagcgtactttaaatcagccactggaatccccaaactgtgtttttgtattttttagtttatagtttaggcttgcttcatttgcggttagaaagtgctctgtatttggtcccactgatgaatggattggacagacgctaggtggcaccagctgttgattattaatgaaatcgtaaagtctatatgccacgcacctgaagagcaggcaaacccttattgataaatgcattgtaagagctggaaatgtctgccaatatttcttgctctaaaacagggtcagcctgcagagtgatgagaccacgtgaagtcttcaaatcccaattgcttaatcctgtgtcttctgaagtgctttaaggaagaaaaaacgatgaaggagaaatgcataaaaatagaaggtgtgaaagagaagtgggacacaatgaaatagactgcaaacattttaatatatttttaaatccagaattagtgacttttataaatctatgtgagttttccccaattctctcaaactcagattgttttctctaaggcatttatattctaaaacaattatttatctcttttaggtaaaaattttattgagcatcattattttttaagtaaaaaaatctcccttatttctctttttgtgataagactgtcaagtgaaatttcccacatgagctagagtagctgcctctcaggtgttgctcttcagaaagatgagcaggggaagacactatcggttaagaaatatgctttgaaatgttttgcctgagaagcttgctccatcctattatcctcccattctcatataatccatcttttaagaaggaaaaagcaaataaaaacaaaccacttaagcatgtgcatacacacacacacacacacacacacgctttggaaaaaaaaaaaagtcagaactgtttaaaaagagaaagccacgacaatattttagttggtcctggagttaataaactaaagtgaaaaataggaaggaaagtccataattagattgtggagagtaaataattacttaaaactggaaatatttttccagaaaaatatgcaatattttttcttcactgggagtaactgacaattcctgaagaaggtgagatggtttagaaagagtgcaaagataatatatgctgtgattctccaatgttatctgaaaagtatgtaatatggctagttatcttgattatagcatggactttggtaaagatttttatgatgcccatatggtgaaaatggagaaatatttgctgtttgacataagagtctggtcaataaatcagctggctaaatgaccctgcctgtgatgtatcaattaatgaatcacagtaaaccaggaagagggcctttcacaggactatagcatagttctataaaattggttccatctgacttgaacctaatcttctgtaatgtgccttatgtctctgttcttgaacctacttggcctgtgaaatattaatgtccaaaaactgaaggacgatccagatagcctgtctatctgggaagcagaacaaatacattgaactattagggtaccaaaggattatgaccacctaaaaactgtggtgaggtcaaagagaataattgtaataggaataagtataacatcctaagctaaggttcataaaatcaatctggcaagtacaggacatgagagagttaaagcttagtaataattaattgaataaatcttactgattttgttggtcatcattattatcagtcataattcatatgacatcaaaatacaatgaaacaaagtaatattgttagacatgtatcctgaaaaaggaaatgaaaaaaatgagaacgaattttagaaggatatatatgatataatggtgtgtgtgtgtatatatatgataggtatggtatatgtatatattatatgtggtaatatatacatattttagaaggacaccatgatctaagaggaaccttaacatttgggggtatgttcagtgaaaagtgtctgaatgctaaaaggtcctacaaactataacatttgaggggcatggaaagtactagaaaagtgaaaagttgaagaatacttgaaggaaaaaagtagagaaaattaagctgatttcaaatattcgatgtgctataatgcagaagagggtttagactcacttgcacctctttggtagcaatggaaaagtattcttccagttaatgttgtgagcagagaattgattactttgtgagacactgcactccttattcctaaagtgttcagtgctaagaatggagtttctgcactaaatggaaattgaagaagatgtctgagataatttttaactaagaatctgtgagtccaatcatttcttttaaaaacatgttcttttttttagacatttatttctctgagggtctctactactccactcgcatcatccaggctaggggtcagtaaatgatagtccacattgtcacatctattactgtttgaccagtcatttaaaatggttttcacgtttctgaattgtttcatttcaagaatatttctgacacatgagattatataaaatttcaatttaagagtctatagtttatttggaagacagccacacccatttatttgtttatatgctatataggactcctttcatgctaaaacacagttgagtacttatgacagagaccatgtgggccacaaagcaggaatatttactatctggccctcgataggaaaagtttgctcacctcatctctagactataaagaaattttgttttttgcttattgactcaagtatctaaacaagcaatgtaacagttaaataacagttctataccataaacagaaattgtaaccacccatactacttaagtactagagacttggaaaagtagttcaaatatgcagcctaacagataaagatggtttcatttggctgttagtctattgagataatttacttgttgaggaatgtttatttaatgtttccataaaaaattgaagtctctgcaatcattgacttatatataatatctgcctagtttgactccattaatcttgctgaatttacctatttggtaggattctgttatttttattgctgcttttccgttagtgtatgatttcagtagacttacagaaagggtgaaagtcaatggaaaacaaggtaaagtgagtggaattttcttcttgcagctaccctcttctctcttcgtgggtttatagactctctcagcagctttggaattgcagttttagagacttacttttataacattatgagtgtgttcttgatcaaatatgttctagaagggatcaagataaaacaaatgcactgcactataaaagaacagttaagggttttagtaaatgattgataagacatgctaaatttaagaattagcaatgagttatttatattttcctgaacatagggatatgagaagggattttttttcatgtcataggagaaactataatcaaattctaagcataaagctgagggattctgaatttaccaccaaatattacaatctccatagttccataatgtgcaactaaaatccccacattttttttctagggaaagatataatttctgctcactggtagcgctggaaattcctgtaaaacccataggattcttattgtatttccatgaggatgttcctgagcagctactttgtgatgcctgtctctatggtaacagacacaaggcttaagggtctgaaagaaattcttcctgttggcttaggaatatggagcaatgagggagacccactgaagactataaaactgaggaaaggcaaaagaggcaattgagaaaaagttgtcgtgggggagctttttttgtgtatttgaaaataatttcacaatttcatttgctcttaatatatctctgaatgaaataagaaccaacatacaagtaaagttttacagaaagaaaaaattctgtgaaagtattgttttttaaccatctagtcaattttatgtaattgaagtcacacagattttttctttagttggcttgcctttcgctactcaagaaaagattgcttcttgcctgaaattggtaagaggacggctctacccctggcaaatttagttcttgttactgctatcaaagatcttgatcttttaaaggactttctttttcctgattccaagggtaagaatattgaactctggttcacattactcataatcactgagcttctcagggaattatgaaagtacactagccttccaagatgttcttttttaggtctatttctcttaaagaccagtaataaatagagcaaatagtactgcttatttgaaaattgggtatttcgtaagaggatgctgggtgagagtttgtgtttttacatgttttactttgtttctcttattaaaataacaaaaaagcaaacaaaaagctcctagaagtttaaaaatatttgattttccatttatttgacttcatcttactttcagcttagcaaatagggacacatcacatttgaattgttttagaaaggagataaatatgactctcctttcccttagattcaaagtatatgttcaaggtgtcatcaaatagccaaaagtctttaaaatatttatgctatgtaaatgtccttcaggaaaatataagtcagagggaggagatggccgtcttagtataaagctctcatgtgtatttgcagtgttaacatgagtgttgatgttttatttatcttcttaacatgttatatctgcacatgtcttcatttgttatatgttagggtcaacagaaaaaataataaagttattgcaagtaagcaaaaacttataacctgatcaataaaaattaatattttaggttggaagataaacacatctcaaatgtcattttataagatcaagttaacaaatgttagcatgcttaaagctttagaggaattaaatctttttatggtttattttctgaccttgagaaatttatagactctgtgcagatatatgttttcacaaatttaatccactctatatagatattagtaaaatgtaagacagtgtcttcagtacctgttcacactatctttaaattaaatgaaaaaactcaagttagctgtaatgtttcagtgtctcctttgatagtgttggaaagcaaattttttaaagaaaaccttttttataactccatacattttgacctatagatactaattgcaatataaaatgtgacatctgaataaaacaagaatactttaaatattcaatatatatactacttttgaaaagatgacttaaattataaacatataaattatatgcctaacatgactggcttccaaaaaacttattttcttgagctttggggttacagcctaaagtgcactgcagtaaataagcaaatgggtaaaaatattgtctagacaaaagtaaaactgagatgttcttttgagcaaacgtttatagaggaggtacaggatgacaactggaaacgtaggtggtacgcagagattaattgctgtcaatgtacacctgaaggtaaatggatggtgcttatcaaatttccagaagaaatattgacattatgttgcaatttgaagacagggttatgaatacaaagagctaagggaaaataaacttatcagcatcattcagctctggtcatgacattgttacaactgattataacactcccaggataaaatgtgataaggaccatcatagtctgtttttactagtacagatttcttttatacatgctataagtagaattgttcggtccagcaacaataagctggattattgaaagtgacactaatgctaacctgaaattgtatgggttttaggggagatgtgggactcatttatgttctatgacaagtgtaaaaaggagattaagtaaaagcctgcatgtgatggacacattagtgagtaggaatctcaggttcctctccctttggctgctgacccattcatgggctggttttggtggccacagtggcaggaaacagagtctatttctccattaggtcatccagacaggattagagcccaccaactgaaatgaaaggttgtttctgctgcttttcattcatccaacaaatatttattgataaattctaactgccaggctctgtgctagagcaagatgactaagatacagtccctgaggaatttagagacgaacgtggtttatgtggatgagaagagaaaaatatttacagtgaatagctaagcagagagcaacagcaactgtgaacccagacagtaaagctgacttaggactgagctagaggtttccggagttcctagtgtgagtgatgtggaaaaactggcaagtccatcaaagagcaaaatgataactgaacagaaagaaagcaaatccagtgaaaaatagtaattcaaagtaaagggtaaagcgacatatttgaagtgtcacttgaaataaaaaggagcatgccttccacctgttgctcatcttcactggaatcaaacctagaaggaaaatgtctaggctggtctaaaagccagttgcatacaatgatattaaatatgattaaagctagcatgagcatgaccatgcaaactttcaggaggatttgaaaacagttacctcccattggtagtttatgtacgtctatccctggaaactttttcctatgctatctttagagaccttgtcatattttatctcaatgtctaacactctttaattagaagctacctgaaaatgtttcactcatgtataaagttaaattaatcacagaatcagacctcagaggttacaaaggagggctgaaaggataacatctcagatagaatagatctattgccaaataaacctgtaacaataagaaattgtgttagataatccgtaaggttttatccaatttcaacatcttccaatttaattgatctccagcctcacacccaactcctcctaggaaattaaaaagagacaggtaaacaagatattttctgaagaatcgaatcatccagaaagtcattctctctcaagcagtacattttctaaagaatttaattatcgaaaaaagtctctctctctcctctttctctctcccttcttctgacatatatagatatgcatatatacacatatatgtatatatttatctatatatctatttatatctctgactcgctgaagtaacttagatatataggctaaaggcaaagaaaaattcctcccaacattcattagtaatttccctttatagattaaggaaagtatttctgtcctccttgatttttaaaacattttactgaactataacacgaatatataaaagttcacaaatcaataggtgtccagcttcatgaattttcacagattgggcacaccccagtaattactcaaggcaagaaaagaatattaccagcatccaaaaactttgtcttaccacttcctagtcaatactctcccagaggtaagtggaatactgacatctaacacaccattgattaggacagacagttcctgaaatgtatgtacttgaagccatacagctgtactcttttgtttctggctcctaaatctcaacattctgtttgtgagatctatctaatttgtttcttgtagttgtggtcccataattttcagtgttgtgtagtatgccatcatataaatgtcctataatttacttattccatctactctggatgaacatttaaattgattccatttgtgaactcttaaaaataattccactttgaatattcttgcaaatttactgcacatatgcatgtagttctgttatgtgccaagaagtagaattattaggtcatagaatagtgaaatactcatctttagttgaaaatgccacgtagtttttcaaggtaggtaaacaaagaaccatcattactttatagaagttctggacatgtcaatgcttagcattattagtctttaatttcagcctttctggctgttatactatagtatctcattgtgtttctcatttccatttttttctagtgactaattaatttgagaaccattttttgtgtttattgctcatgtggatgttatctatagtaaggataacatttcctcccaactttcattagtaatttccctttgtagattaaagaaagtaattctatcaacttgatttttaaaatgttttactgaactataacacaaatatataaaagtgcacttttctaatctcatgctcatttttctattgatttacaattttggtttttataggtatgagatctttacatttttatatggtccctacatttattgtatgtgttgcaaacatctagacagatatcttttataggaacttagaatttcaaaacccggagaccattaaagaatatttagtcccatatcttagtttgaaagatgaggaaagtgtgacttatagagaaattgtcatttcttttaagtttcttccagttagtagtaaggccagatacgtaataaaagtctcctgacactgaagtaaagggtttttttctagtaaaccatgtagggtctttagtcttgtctaatactgtgactcaaactccttgtctcttttggaaggccacaaaatgcgtgacatagtaattttaatagcaagtatagagtgatgcgtgattaatctcattgattttgtgaacaaaaatatcttcagctaacaaactgttgtatagcatggccatgcaatatttaaacctgtatgggccgggcgtggtggctcatgcctgtaatcccagcattttgggaggtcgaggtgggtgtatcatgaggtcaggagttcgagaccagcctggccaatatggtgaaaccccatctctactaaaaacacaaaaattaggtgggctcacgtgcctgtagtcccagctactcgggaggctgaggcagaagaatcgcttgaacccaggaggctgaggttgcaatgagtcaagatcgtgccagtgcactccaacctgggtgacagagtgagattctgtctcaaaaaacaaaggaaaacaaaacaaaacaaaaaaaacctatatgttcttttcggcatcagattttatttttcctctttcataactttattattatattcagtttcttttcacatttattcttattacttggatgttcccattccaaatttggttctaattcaaaaagttttcattttctatagtggatgaagaacaacataaattttacaatactttcttttagtgagataaaatttagtttacaaaacataattactagtacattaatatttactatttatttttaacatgctaggtgcagttcatgcgttattttagctaatctttggaacaacccccgccaaaatgttttattatgcctagtttatagatctagaagctgagcctaagtgagattaagctacttgtgaaacagctctaatcagaaccagatctttataagattctatgcatttcactccttccatgatctacttctgtacctgcttggaaggaaattgagttagtgatacagatttgggtcactacctgcctttagttcttctgccatacataggtcttagggataacctctttttccaatatcattaaataattcattttctgtatcttttttttccaaaacggtaattagagaagtcacttcgttggccttgattttattcattgtattgaataaatacaattttctaaatacggaactcttattcatgtgcaacctaaatacggattaggtgagttaatatccagagaccagattattactaaacttttcttgcatttagagactgaacttattataagaatcttttaattctttttagcaacctattccaaggttgattacttctcatgcatattttagttccaaatatttctttctctttcttgttcattggagaagcattccacagatgcctgagaaacaacttgctctcagtctctctatcttctagtccttggctagagtccccttgccacacttccctagcttcatgcagagtagatactcaatagtacttccacttagaaatttaaatccagatgagttacctagcatgctactttcctcttaaggagtaagtgaagcaaatgtttatagttgtttcactgtatgtgaacaaataggaatgtcaataaaacaagtacatttaattcataagtacttgataatcttaattccttaaatgtataaagctttaaaattaacaaaatactttcaagtttaatttattcacataggaaccatatgaggtaagcaaggtaggaagtcttatttcctctttatagagagccatgtaactaatttctcctatttgtatcctaaatttcttttagctctgccatcccccctccatatctcctgacagtcaccaccttagtttagatccccatatctgacttcgaatacactgatagcttcctaatgtaccttccttcttgcttctctccagtttacccttcacaaggctgctaggcttatctctctcaaagacaaaacttaataagttattccactgcttaaagtccacaggtggctttatattatttatagattataattcaaataacttgcatgaagagaaggtactttacaacaatttccctgccatgtgctcagtctaatcttatatccaccatgtgaatgcctcaccctagccatacaaacagttctctgactgtaacacacttccttttcatgtgcctttggaaatgttgactccatcccacagtcataaacaattcttattcacatatatttacttggtacatgctttataatcctccaaaatagtgtagctagtgcctcttctttacttttggctgaatcatgcacccctgtgcatagaatcttcctaatacttgtttcaccacttattttgctgtgatgtacttttcaggttattgatttattcataaactattagtgcctgagggccatgaattctctattctttttttttttttaccctttgcttagctcttctggagggagctactcaagtttaacttaaagtagtaatgagttacacagccagtaagacatttgtttgagtcctaaggtgacatcatttccattgcatccttcttccctctaatattactaaccatagtacacgagcagtactattgtcaagattcctcctcattcagtttagggaaatgcgttgacccaagttaccatttttgtctatttcacaccgtaaaagtcgggatatttagttatgatggtatgatagttaccctacatggtattttaaaggctctatttcctttgtgacttacacatgacctccccagaggtcttaatttaatggaatcatcacctaaaataatagaagagtaaattgacagtttcgtttataaggtacatggattcaggcatattggtaaagtaacacaaagcaaaaatgtggttcttcatttgtcttgtttcatcactaatagaaaatgatggagttcaccaatcacccaattgtactgtgcagcatggttattgtaaagtatacctgaaattaaaagcaaatatctacttccattttttccactgaattttcatcagaaaatgagaactacatactgaaggatttggggttggcgaatagcagatgtataatgccagcaatatgaaagcagagcaaatgcgtgattggtttacagcctcaacttcagtagtactctgcaaagtctgccagcacacaggtgccttgaggctgcaaagagcgtaggaattcagtggatgtatcaaatgatatgagatgttaatacctacttccttctaatgcatagctttgtgatattagaaaattaataaagaagtgaacaaattaattactttataatctcctaaatcttctctgtggaaggaaaatctcaaagatgcattaagtatccagcaaattggttttgaaattatccattattaaaaagcacaattctgtgtaacaggaagccacatgccaagagctatgtatatttaatcatttatgtcgatgctttttgtagcaattctgtttattctctattgacattatatacagtcctttttatacatagtggaatttaatgtgctgtgtttaaaagacacatcaagcctgacagaatccaattgtatacattatacttttaatttattagaaaatgaaatgatcatttgtgggcttatattagccaaagcagaggataaattttattatattaagaaaatcaaatactgtgactacatttacaaacattgtaaacatgacacttgttgcataattaataaatgaacatattgacctttaatataaaacggcatgaaaggaaagggaaggtggaagatataaccacaatcagaagtggaaatgaactcaaaatctgtaactgtatattaaagaaacatgtgattcatgattgcttttttgccttttccattttgaggcaatagtgccatgttgatattcatttgtgctgtcaaattaagggaaaacattgacaatctttaatataacaaagatagagaataaatgcaggtcaaaagtgtgtgggagaataagagaattgatcacattttaagaacaattacccatgtcactgcttaacccaacgtaatgatgtcaaccagtaggatggaagccagcatcaggaagaatcattttccaagcagatggatctgctgatatttttaattgattgaaggagcgttccattatttttaatcaaaaactaatttcaaataaaatggaaacttccatgaagtttgcaaaaatctgtatgcattaaggctcagactaatagaactacaatgttgtgatagttaataatccattatttaattataatgattattgttcttaacacattacacatgggagtttgtgggaactaccctacctttcttgcttctcaggtgagacaaatcattctcctagtggtctcaagtggtactgaacctcattttatcactgatgacatgctcatgaaactcacactgtactggtgttcttttctccgtctcactcacttctttgctgtgcttcctgggatcacctccgaaataagttgctggcactcaaataatttgctcagggtctacttctggtaaaaggcaacccaagacaacatgatattttattattaatagttttcctcatttaattttatatataatcatttttttctgacagggaagtatatttgaggaaataatgagggcaattatcaaaatatgcattggtttgggagttagagaaactgtcagaagtgacacaccaattttgctacatcgtgacttggtaacagtcattaccattctgggccttttattctcttctgaaaaaatggaagcattcgattacaaatcattaaagaataaagaagatagaaagtgatagaaaagataacaaatgttgatcacaccatgtgcaattgcttgatagtagtttccaggagtactataacagactgagactgtatctacttggaactcgtgggataaaataccattatttgatgccgtatgtgctcggcatgaatgcagtgggaaggatagaaaatatttcatatatttgccaactgtagaatatactgtaatagatcaagtttcattttaaaaatacacaggacacatttttttaaaaatctcatatgaaagcccagcaaagaaaagaagaattgaaggtgtagacatcttgaatgaaaacaagaggacgatttgattcaactgccatttattccaactttcaccctataaccccatagacacagctgtagaaaactgagatcttgaagaaagccactgaattagataatatctacgactacttccaactacaaatgtagaaataattgtctttacctactcatcctcagctagaaagcagctaatgggctactttaaatgtgtgatgctttcacaaattaagcaagactgagtacaacaagcacaacaagtccaacagcacaagttttcacaaacagtattggatgtaacaatacatccaaccagtattagatgtaacaaaaattggttaatttcctaatcaattaattaggaaattttattttctaacctgttggttgccagttatgggcttaagatggaagccagcatcaataggtttaaataatacctttgttttaaaaagaagaagtctaattcatagtcaaacatgtgctttggctaagtggctttgttctgggttttgcatgacagctggtgataaattgggaaaatgtgtaagtagcactgtggtaaggataatgttgatgaagatagaatgtttgaggccactttcagggagaataaaaacgacataaagtaatacttaagactgaattttcttagagatgataatctcatcaccaagcctcattttgccattgaaaaatttcttatgaattcaactatcatatttacatcacaatagacagtattataactctttagcatagggattttgctttaacttactttcaaccaatttatatgttaaagctatttatatctctgctgtttcatgaataaagcccagaggtatcttctttcttgactcactgtcatatcttcacatttcatcacatttttgcagttcaaatatcattcacttagtaacactgaaagcatagaaagattaatcagaaatgatttctgccctcaacaagctgacactggttagagtacaaaagccacactgaaagaatatatggagatctatgatctatgatcaatgatctttgaagttactattgtcatttttgggggcaacatgagtcatgcccatatgaaataacaaacttaatcaatgttgtgtgtgttctgagtgctctaccaaccggccacccccacccccccacatctgtctccctctccttggacctttctattctgagacaaaccaatattgaaatgaagccagttaacaaccccacagtggtctctaagtgttcaagtgaaaggaagagtctcacatgtctcatcttaaatgaaaagctagagatgattatgtttagtgaggagggcatgtcaaaagctgagttaggctgaaatctaggcgtcttgcaccagacagttagtcaaggtgtgaatgcaaaggaaaaattattgaaggaaattaaaagtgttacccccatgcacacatgaatgaaaagaaagcaaagcagtcttactgctgatatggataaaatttaaatggtctagacagatcaaaccagccacaatattcccttaaccaagagctaatccagaggaagatcccaactctcttcaattctacgaaggctgagaggtaaggaagctgcagaagaaaagttggaagctagcagaagttggtttatgaagtttaaggaaagaagccacctccaaacataaaagtgcaaggtgaggcagcaagtgcagttggagaagctgcagcaagttatccagaagttctagctaagatcattgataaaagtggttatactaaatgacagattttttatgtagatgaaatagccttctatttgaagaagatgccatctaggattttcatagctagaaaggagaagtcaatgcctggcttcaaagcttcaaaggacagggtgattcttttgctagagtctaatgcagctggtgactttaagttgaagcaatgctcatttaccattctgaaaatcctagggcccttaagaattatgctaaatagacttagcctttgctctataaaagtaacaataaagcctggatgagagcacatctgtttacagcatgatttactgaatattttaagcccggggttgagaccttgtgctcagaaaaatatattttttttttcaaaaatattactgctcattaataatgtagctggtcatccaagagctcatttggagatgtacaaggagactcatgttgttttcatacctgctaatataacatccattctgtagcccatgggtcaaagagtaagttcaacatttatgtctcattatttaagaaatacatttagtaaggttatagctgctgtaaataataaatcttctgatggatatgagcaaaggaaattgaaagccttctgtaaggaattcaccattctagatgccattaataacattcatgattcatcggaggaggtcaaaatatcacatttaacaggagtttagaagaagctgatttcaaccctcatggatgactttaaggagctcaagttgtcactggaagaagtcactggagatatggtgacaatagcaagagaattaaaatgagaagtggagcctgaagatgttgctgaattcctaaaatctcataataaagcgtgaatggatgaggaattgcatctgatggatgagcaaagaaagtgctttcttgagataaaatttacttctggtgaagatgctgagaacattgttgagatgacaacaaaggatttagaatattacacatacttagctgataaagtagtggcagaatttgagaagactgactccaattttgaaagaagttctactgtgagtaaagtgctatcaaacagcagcacatgctacaaagaaatgttttgtgaaagaaagagtcaattgatgcagcaaaattcattgttgtcttattttacaaagttgtcacagtcactcccaccttcagcaaccccaccctgatcaatcagcagccatccacattgaggcaagagcctccactagcaaaaagattacaactcactaaaggctcagatgattgctagcttttttagcaataaattatgtttttgttaaggtatgtacattttttaacataatgctttgcacacttaggctacaaaataatgtaaatataacttttatatacactgggaaaccgaataattcatgtgactcactttattttggtgatctggaactgaacctgcagtatctccaaggtatacctgtacatattcattcaacttttaccctctaacccgcttacttctgtccctgtggctattgctccaacatcatgataaaaacaaaacatcacatagaagtatggcaattgtactaaacgtattgtaccattggcatttggtgtctgtcgtaccatcacaattgagcctcatccttctttgttaacgcttaattcagagaaaattttcattgagattttataaatgagtaatatggctctgattattgccctgtctgactgcttttatctctatacaatattgtgagagttgctaaagagacttctgatgctgccatatatgtaattggatatttttaaattccatacagtcatctaactgacctctcacccactcaccaaaaattacaactcactccatttgcataaagtaaactgtggaaatatatatattttacctttttcaatctaaattattgctcatggagagtctatttcaccacaaacaatgctatatccttaccttaatggagtattacaatgtaattagccatggaaatggaaaaaatgaaagaaactgttatgaacacatcttcccttttaagccaacttgtcagattttgatagaagaaaaactttcaaagtcttcttacgtgagtcaggtcccattttcttatatttgcattctgctagatttacatctgtctatgacgatgatagtaaaggtgataatgatgataaaggttatgcttatgataattcctcataatgggtaactgtaatatcagataatacacgataagatctttaaaagaaagatgacaagtgaatctcataggagttcagagcatggtgaggatggccctgatttttcatttctgtctctctagtgcattttcatacacactcatcatgggggaggagggcactcaactcaattcagtttatgggatttcatcccagatttctaaatacattatacttatgactctgttcattatcccacccctcccttctctgattatggatgtagtgatgctgattatttttatattcttcactatgaaataactatcattcttcatccatttgggcttctataaaaaaaaataaataataaactgggtggcgtaaactaaaaaaataataaactgggtggcgtagaaacaacagagattcattgctcaaagttctggaggctgggaagtccaagatcaagatgaaggcacactctgtgcctgatgacagaccgtttcctagctactagatggtaccttgttgctgtgtccttatatgatgaagaggcgagctggctctctagggtctcttttataagggtactaatcccaaacaagaaggctctgtactcataacctaatcacaacctaaagacctcaccccctaataccaacctcttggggattagctttcaacatttaaattttggaggaacacaaatattcatactatagcaacattgcaagcaaaattagaataatgtattagtactgttgtgtgggatataacatgagcatgttaagaagagaatcactggattttggaatgtggtaaggccaattatctaattctcaggggaaaatactcagtaagactgaggaagtaggccaggcaaggtgactcatgcctgtaaccccagcactttgggaggctgaggcaggtggatcatttgaggtcaggagttcgagaccagcttggccaacatggtgaaaccctgtctctactaagaaatacaaacaaacaaaaaaaaaattttgctgggcatggtggcacactttagggtggctgaggctggagaatcactcgaacctgggaggtgggggttgcagtgagcggaaatggtgtcactgcacttcaccctgggtgacagagcaagactctgtctcgaaaaaaaaaaaaaatacactgagtaattaaatgtgtaaacatcattttaaaaaaacttttaaaactagtttttaaacttttaatactttaaaattttaaatcatctaatcgaacatgtatataaagatcaaaacaaattaattgtttcagtagaacagtggtgcctagagaactttatttctctggacccaattattcttaactcatcaaatcatatatatatctgtttattcatacgccactccatatatacctaagatagatacatagattgaatcatatgaatttgctgatattggtccattttgaccaaaaaatgataagtttttaggattcaaactaatagctctattactgtattgattaagtggagtgataaggtaccagtgcaatatgttatcactccacttaatcagcacagtaagcccaagaaacataaaacataaagaatattttagaaaatgatgatgatgatttcattttatcaaagctatatgctcctttactgaaatcagacaagggaaaatgttcccttctgtagaaactttattaatcccttatgatcttaatactgttaataatggactagactgtaaaggattaggtaactgaggtgttcaatatggatacttgttttatgtttaatcaaatttatctgactctaaataaatttggctgaaactagacagattccttttctattgagacagtgggctctattaagcactatgtctgcataggaaacattacaattaattttgcagtgacaatatgctttttaactaacagactaatggaaggaggactgatgtaaagcataattctcaaaaagaggggggtaaaaccttggtttctactacaattattcattttatagtattgtttgataacacatactttattaaattgtagatgcattgtaagtttttatagtatatgggaatctaaataaaaggagttatttggttgttatgccatatttagcataaatattaccatccatgtatgttgttgacttaaaacactgttattttctaaaatgtaagcatagaaaaagaataaaattcttagttgatattgcagaaatatattgtagtgtttgcagcatgaaaaggttttatatataataatatacacttaataattaatttccaaaggctgcctgtggtcagccttctttgaaagcatggattctggcaaatgagcaatataatctctttaagaccatttaagctcttaatctcttcaaaccagtaccaaagtctgttcattttgttgtaatagttattgtgtattgtttctttttaattgtgtaagtgagattcaacatcacttgtcagataagaaaaaaaaccttcaaaataaacgttaatttttcccattattgctagaaggaacttggcgtttgaaattttagatattcttaaaatttctttttaaaaatttagaattaaaaacacaaaaagaaaaaagaaaaaaatagcatttactattattccccaaaaatgaaatagtaagatattaacaatatatatatgagatatatatcctgaaaattacaaaatgctgataaaagaaatcaagacctaaataatttcagggatatattgcattcatggattggaagactcagcatagtaaagatgtcaattcttcccaaatcgatctatagatttcatgactgaaaacgattaatgtgggaggaattgctctactcaacatgaagaccttagtatatagctacagtaatgaagacaatgtgatattggtggtgagacagaaacatggagcaatgtaataaaatacagaacccagaaatagaaggaaattattatgccaaactgattctttgcaaaggtgtaaaagcaattcaatgaaggaaactatcattttcaacaaatgatgctagggtatttggatacacataggcagagaaataaacttgacctgaacacctcatactttattcaaacattaactcaaaatagatcatggatactaatataaaacctaacgcttatagatttttcatatatgtatgtgtgtgtgtatgtatacctggattatttccatctatgggtatatatgatttattcctgcctttcctttaaacccaatataattgagaattagtgcaggggtttttcatctttcctagttcaattttacattaataatctttatccctttaaagatattgatattgaattgttggagtttggttttcagaacagatgttttacagtctctggtagctaattgagttttcccattcccttgattacttcttgtactcttagatgaaagttgagtatgtttttcagtgtttattgctaggaaatagttgattacagagtcatttactagataacaaacatggaaagtaatatgacaggtttttgcttttaattgtgcttttaatttttattctacatataggaaagggtagttttcaagaggtatattgcaaaacatttgataaaaatctcttaagaaaactgaatcttgactcaataaaggaacatatgtttccaagcttttttgacaatattaaaaaaaaaactagtcctctggtcaaataaattgaagaagtttctacacaagagtcatgtattttatgtactgttgtaggcatagtaatgatcccccaaagacatacatgttctaatcttaggaagctatgaatatgttgccttatatggcgaaatttaggagtcctcaagtctactctcaggttcaattattccttaggaggactcatataattcttaaaagcagttacactcatgattacagtttattacaacaaaaagataaagactgaagtgaacaaagaaaaaagttgcatacaaccgggttcaggaaagaccaggtgccaccttccagttttcctctcctcatgaagtcatctggacagcatttaattatcccaacagtgatgtgtgacaacacacacatcgtattgccaacgaaaagttgcctaagtcttggtgtctagaattgtattggagtttgtagtaggcatggaacactcacatggctgactttagtcatctccagcctctccagagttcaaactgatacagtgtaacctaaaagctgcaccatacattattaaaataaactatctggtattgcccagaagccagtcaagagccagatatttctttggaatgtacagagtttgaacaacccagtcccgttaagttaatattttaccataaaaaggcaaagtttactttgcagatttgattaaattagggactttgagatggtaagattatcctggattatgtggatggaaccaattaaaaataagcacaaacacacaaagatccttcaaggtggctaggtgcggtggctcatgcctgtaatcccagcactttgggaggctgaggcgggtggatcacctgaggtcaggagttcaagaccagcttggccaacatggtgaaaccccttctctactacaaaatacaaaattagccaggcatggtggtgcatgcctgtaatcccagctacttgggaggctgaggcaggagaattgcttgaacccaggaggcggaagttgtagtgagccaagatcacgccattgcactccagcctgggcaacaagagtgaaactccgtatcaaaaaaaaggaagaaaaaaatccttcaaggagtcaaaggagatgttggaatgaaaagcagtgtgtcagagtaatgtgatgtagactggaagatgctatactgcttgctttgaaaatggaggaaaggggccatgaatcaaggaatgtaggcagcctctagaagctaggaaatggattctcccctagagtctccagaatgaacagcgccccattgacaccttggttttagtccagaactctaagaaagataaaaaaaaaaaaaaaaacaaaaaaaaaacaggctgggcacagtggatcacgcatgtaatcccaacactttgcgaggccaaggtggacggatcacatgaggtcaggagtttgagacctgcctggccaaaatggtaaaagcccatctctactaaaaatacaaaaatttgcttggggtggtgatgcacgcctgtagtcccagcgacttgggaagctgaggcatcagaattgcttgggcctgggagatagaggttgcagtgagccgagatcgtgccaccacactccagcctgggcgacagagtgactgagactctgtctcaaaaaaataaaagataaaaaatatatgtacatttaaatcactaagttcatggtaatttattatatgagcaataggaaactagtagagtttaatataattattatgtctatgtttgtgtagatatatacataaatgggggttgtgtgtgtgtgtgtgtgcgtgtgtaatgtcaaagcaaactttccaaatgcttacttcttgtacatcttaacctcaaggcacacaaacacacactcagttgcataaatgcacattctcacattacacacacacacacacacatatatatgacatactacattctgttctagcttcctttaatgacagctcacaaatatgtgagtagaatacactgggtttgacttgggattatgaaattcatggtaaacatcatcaaggcagatggatatctaggtgtttgattatattgatgaacaggttttggtatacaaagtgacacttgttattaaaattttgatttcatacctatttcaaactaaattgcacctacagtccctttgcaagctccactttttagaaattcagctttgtattcactgcatttatgacattcctttgcattttttttttttttacatccacttcgcttaacaagaagacactgaagttctaagtagcactgtataggactgaattattaatacagttcttcagttggtaacaagaatgctcttggaaatatcttgtacatttgtcttctcctggttacttagtagattgagcatgtaaaaaaatcttttgcttaaaattgcagtacatcttaactgacaatacttcttaaccatagtgcctgacaaaacctggatattataatctcgacgtacaatttggtccagcagttgatctctgctcagatcattcaaaagggcaattagagaaagtcaacaatacacatgtctgtaatttagttttctgtacaaacaccataaccaaatgggatgaaaggatttaaccatttgcaactaaaaacagtatagtgctttataaaaagggcctaatcaagcagtatattgattgaaactttgtacagatggttctcattattcacacattctgtgtttgggagttctcaaaacttgctaaatttaatttgtatccctaaaatcaatgctcatagcattttcacagccatttgtgtgtatgcatagagtggtgaaaaatttaagtcacccaccacacatgttcccagctgagatcaaaaaaggaacactctgcattcttgcttcaggtctcatacggtaaacaagtgtcctttcagcggtgtatttaatgctatgtttttcatatttttatgctttttcttggtgattttgctgctttaaatggccccaagcatgatggtgaatttctgtctagtgttcctaagcttaagaaggctgtgaagtaccttagaaagaaaataggttccttaggtaagtttccttcaggcttgagttacagtgctgttggctgtgtattgaatgttaatggatcaataatatatattcaataagatgtttttaaacagaaaaacaggcaaaatgggattatacattgctggttcacaaaaatgttatgagcagaggctcccagaaatctatcattgtatttctcctgggaggaatgcttcagtattcactaattcagtgttcacagtgactttatagaaacacagtgaataacaagacttgactgcacattgtcatccttcatccaacccacttgcatagtgtagggtctacactttccaacagtactaaaaacccagaacgacattcaagttatgcaggtgtattatttagctgtatttgggttctaagacatgagtaaagttatatatttgtacagctcccaactatatacagttgtccctcagcatgcacgtggtattggttccagtactctcatgtataccaaaatctgaacatactcacatttcacagccaactctgcagaacccgcacacaggcaaaattggccctctatatacgtaggtttcacattctgcgaatactgtatttttgatctgagtctggttgaaaaaaatggcatgtaagtggacccatgcagttcaaacccgtgttttctcaggactcaactatgttatttatccttttacttttttattccttttttattcctgtgtataaaaaattgtaccaccagtacaaggaatgtcatgaaattgaaatgacaccattctgtgtttcttaaataaatgtcatacaggttctatgaagaataaattctcttgctaaaaaaaaaaacttgctatttttcatcatttgattttctcatattaacatttttcatcttaaatagtctttctctttactatttcccttcacatttcttgaaaattctttttcttgcccatctgttttgtatctccttattattttctttctgtttttattatgctagccatggtaatgataaaatctccgacttccaactccctgcaccatttggcacttggcaaatggcttttttatgtatttatatttttgttatttatatgtctatatcctaaacagaaccctacgcataagagcaggtggccagtaactaatggcattgataaaatagagccctttacctctattttcttgaaatatgctttcaagaaattccttgtactagatcatcgtgtatcataacattatgaacacagcagcaaaaaacaagaaaaaaattcagactttagtattcgtaagtaatgtcaatacaatatttggtttaacagacatacgatcattttgtttgctatttcaccatattattttttatgtaaataaggtagattatttccaaagtctttctgaatttactaaaatctcattttacatgaccctactttagtaccttaactaccaccctcctaggaatatatctgtggtaagaacagacaggtgtatatatattatagataagtgtctgtctgtgtgtatgcatacatatgtgtgtatctatatattaaagtatgtatatgcaatatgaaggtatgtatatatgcatatatatgcatgaattatattaagcatatgtatatatatattatagttaagtgtgtgtatgtgtgtatgcatacatatgtgtatctatatattaaagtaggtatatacagtatgaagtatgtatgtatatatgcatatatatgcatgaattatattaagtatatgtatatgtgttagatatttatgtatatatgtatatttataaaattatgaagttctacattgaactgggatataaagtccatgatatctttacataacttagaacagcaaaactctcgattcattcttgttttcaaaatccctttagcttcattttctctggtgcatgaaacaacataaaaatccctcttcttgccattaatctcttcaaatcccatgccagatattgtcaacattacagctataaaaattttagaatgttttagggacatcttgagatctttaaattaaaatatccactaaattaacatcataagcctagactcgtaatctttatttttgatctgactttctgtggcttgcaaatttagaatcaggaaatgaaacaatactcaatttttgcagaattagggcttacttatgatgcaaggctaatatggataatttcttaattgactgtatctgctaagacaaaatcaggaaatgacttaattaaaatgaataatttaggtgatattctctatattgtaatccaaattttaaagaagcgaacttctcttagaagaaaaatatacatttaataattggttcaatgttattatagaccttttgtgttctttcagaacataataatggttgctaattttctgggcagaatctcttgataagagagttaaattgactcagattatctgcaacccactggactattgtggtaatggcagatattttttaaatttaattcattgatataaaatatttagtcttttataataagcaattaaacctttgtacttaagccacttcaacaaaaatattacaaaaccattaggcagctacaataggctccatgcatttttaagtacggtttatacagaataaattatttctgtattggaatatcttcttaataatattgatgtttcaagaaaacatccaagctattttataagttatttgaatggagactgaattatatagtagttttttgttgttgttattttaattcatacaccttttcagtagaaaaaggtgccttggttttaactttgttaccccacaagcacagatattaatttttattgcattcttcactaaagtacatcttgcatttgattttcagacatggataagaccatgatagctaatgaatgactaaaataaatcaatactccaaatacttctatgcttcatttttgatggaagtatgagtaagggatacaagctgaaggcctcctatatatagtacttctacattactttttttgttataattttgtaataataatataatcacaccacatacttgtaataaaaatataatattcatctaggctaattggtcaggtcctgaagtaaatatatctcttcacaaaaggccaatgagtgacccacctactggtagattttatgcaaatggttgcatcttgtacacctttattattttttaagtatatttgtttcctacttgtaacctattctaaaataaaaagtttactatctctttgcagtaaaaataaatatcacatatctatatatataaagatagatatggtatacacctcagtatagatataaagctctttatttatttatttgttcatttatttatttatatttatgtttaaatacagacagatttccagattttaaaatgcatttcttctcactgaatattaagggacttaaaccatatactcaatttgtcaaagctgactggggaatataaagaaagggctagatatgtaatatgtgttgctaatattaactagaatcattattttgaagtacagatcttagttcaataacatagcgcgctagagcagaccaaagttattaacttcaattgataaagaattatgaatataattataatcctgttaattatttaacaccgtgaattatgcaaatgcagcaggtattattaatcatctgcaggaaccagaacaatttccctaaaagaacatataaatattaaaaagtctgacttggctctgttatgtactgttagagctttagtgttcccatatgaacactgtttggattcaattatcctttataacatgaaaaatgccccgaatgcatcctctccaaaggccaaatgaatgtcattagagttctccttttgtctataaaatgtttactgactgtgtggtctcgcatgtttgtttatatcaaaatatctttcatcctattaggctaatactggtctgtggcggctggcatcctacttgctaatagcacgttgtgtggatatccttgctgtgagactaagctacatgtgatagtcttgcagtatctaaaaaaattcccaaaattaacatatgttgaaccttccctcaatactaaggaacaacagagcattcaatggagtaattttaactaatttcctaagtatgctcaccctttacagaaaggaaaaaaagaaaaagaaaaggaattccaaattggacctttggaaaacactcaattggggagaggaattggtaaggggcttgaagatctagtttggttaacagattgttgtaaattttcctgaaggaaatattagccctttcctttaaagagttatttgtggaaacctttaaaaaggattttcaaaataaagactgtttgcctcaatatattggagtttaattcctatccatttttactttatttaaagttagacgattaattgattctcagaaaaattatttgttttaaaaggaagaattatttatttcgaaatctcaaaatatttccaaataccactgtgattcttggaatgcaatctttcttgggaaaatgccaaagttgggcaaagactggggtaggagttaggagagcaggcaaggacatgtaggaaggaaggcaaactagggaactattgtgtttttgaatcttttaaactcttagcctttagaacaatgtctggcatagagacttccaaaaagaatggttcaattcaatgtcataagtagcttgtcatttatggcacattcacaataaatgacagtataaatcaactgcgcattggtagacataccagagtcatgactatttcaacattcattttatccatgtgtttccaagtatgataatagctgaacattacgtggtactcaatgaaatttagatttatgtttatgcctcacatcttagcaattatatttgaaaaactggtgtctgtacagaatgttacagtttaaaaaggattttggatgagtaacttttgaaggaggtaggatttggggactctaaaatatttttcttcttatttttattgaatttctgcctgtgactgctttctaccctaacaatagaggcgctgcttactgtgctgcctgctgtatctcactggaaccattagtacttacaatgggcctttctgatctttatttctatatatttatattttttctgagatggagtctcgctctgtcacccaggccggagtgcagtggcgcatggctcactgtaacttctgcctcccgggttcaagtgattctcctgcctcagcctcccaagtagctgggactacaggcgtatgccacgacacccagctaattttttgtatttttagtagagacggggtttcactgtgttagccaggatggtctcgaactcctgacctcaggtgatccgcccgccttggcctcccaaagttctgggattacaggcgtgagccaccgtgcccagcctctgatcttttactctttctaaggatgactcgtgagtgaaatgtcaaactcttttatttatttatttatttttacaaaattaaaaaagatataatctgggaaaaatataacatctgaatttttattatatgtaagtctattaggtggaaggtagaaatagggccagccagtagaaattgaattctttgcatgaaggagagcaaatttaggtgtaatataagaaagaactttctaatagctaaatctgtctcgagttgcaatgatcatgcattcttctctcctcttttatttttggccactgctggatttcagggatcatcatctggactctctctgctccaatacatacttggaatctatttaatcaatgttgttattaaaaggatataattttacatactttaaaagaattttgtccaatactcctcaaaacaatccaatgagctaaatattaatatcctcattttgcagataagtaaactgaggcatagagcatgtattagtcagggtggggataaacaacttgtccaaagtcaccaactatttgagagcacattgaaacttaggcagggtagcgccatagtatcttgttgtaatatctactctatgctgcatctgtcctcagtattacagagacagagtctgggtccccatggctttgtactaattgagactttggattgtttgccccaattttcttctccagactcactttccaacatgacatttatattgctgtgatgtagccacatagaatctctcacctctcacccaaacatgccaggagttttcaagcctctgtgccatttgcctttcccctccatgtcccccacacccatcacagccctacttctaccattctatcagtggaaatctcctacttatttcctcaattaaatgttgttccctctatacatttagcaaataccaggcccatttaggtactccttcctcattttagccaaagcttcagattttcagctctactatgaccatacgttatattaaatcatgtatatttctgttccttgttataaactggaaactgcaagatcaggaaccacatcttcttcatttgtgtacctttagacttcaataagtaaatgcattaaaaatttgtctaaatgaatgatgcacatgtaacataaagcaagagtttcttttcatagtaagtattcaagcaggagctaaattgaccagccagcatcactgtggtaaagaagacaactgcatagggagaaaggttaagctggatacttgtctctatggcctttttgtagctctctcattgcaatttcatgtcatgccttacagctaaaaagtgccagtcagaaatacctatccattgtgtgtggctcaggctagttgattatgatccccaaggcctagttcttagaaaatgtgtttgtattatagtccaaaaggagctactctctgtctcctttcctcactaaattctcttttatatttttcaagtttacagaagctatatttgggcacagacttcagtaatttttcctctgtgcataaacactcaaccaggaaatatttatccctcagagacactgacaaaagatgtgttcttaagttattgctaagaactaatccttttcaccatgggaggaaaacgtaatgctctataatgtgacttatgagactgaaggttttttataacatagaatgaaatgataagagaatactcttgaatatatgtttgtagttaattacagaagtgtgcaaacaaacttctgacattagtttgttttgtctcctaaattaggtatagatttcttttttttttttttgaagttatatttggcattttttttaaattttattattattatactctaagttttagggtacatgtgcacaatgtgcaggttagttacgtatgtatacatgtgccatgctggtgtgctgcacccattaactcgtcatttagcattaggtatatctcctaatgctatccctcccccctccccccaccccacaacagtccccggagtgtgatgttccccttcctgcgtccatgtgttctcattgttcagttcccacctatgagtgagaacatgcggtgtttggttttttgtccttgcaatggtttgctgagaatgatgatttccaatttcatccatgtccctacaaaggacatgaactcatcattttttatggctgcatagtattccatggtgtatatgtgccacattttcttaatccagtctatcattgttggacatttgggttggttccaagtctttgctattgtgaatagtgccgcaatgaacatacgtgtgcatgtgtctttatagcagcatgatttatagtcctttgggtatatacccagtaatgggatggctgtgtcaaatggtatttctagttctagatccctgaggaatcgccacactgacttccacaatggttgaactagtttacagtcccgccaacagtgtaaaagtgttcctatttctccacatcctctccagcacctgttgtttcctgactttttaatgatcgccattctaactggtgtgagatggtatctcattgtggttttgatttgcatttctctgatggccagtgatgatgagcattttttcatgtgtcttttggctgcataaatgtcttcttttgagaagtgtctgttcatgtccttcgcccactttttgatggggttgtttgtttttttcttgtaaatttgtttgagttcattgtagattctggatattagccctttgtcagatgagtaggttgcgaaaattttctcccattttgtaggttgcctgttcactctgatggtagtttcttttgctgtgcagaagctctttagtttgatgagatcccatttgtcaattttggcttttgttgccattgcttttggtgttttagacatgaagtccttgcctatgcctatgtcctgaatggtaatgcctaggttttcttctagggtttttatggttttaggtctaacgtttaagtctttaatccatcttgaattaatttttgtataaggtgtgaggaagggatccagtttcagctttctccatatggctagccagttttcccagcaccatttattaaatagggaatcctttccccattgcttgtttttctcaggtttgtcaaagatcagatagttgtagatatgcagcattatttctgagggctctgttctgttccattgatctgtatctctgttttggtaccagtaccatgctgttttggttactgtagccttgtagtatagtttagatttctaattgttggagagagaatctgtttacatattggtgaccgttacaagcaaatctaaaatataacatcattttacatcatatattaaattatattaaaattcattaataaatttgaaaggaattaattcatatttataataaataacttcagaagattcactgatttaatggaaaaatttgttgataaaattatattaagagaggaaacaaaagacattaaataaatttgaaatgataaatattcagacatttaaaaaattaagtgtattagttcattctcacactgctataaagaaatacccaataatgcataattcataaaggaaagaggtttaattgactcacagttcagcctggctggggaggcctcaggaaacttacaatcatggcagaaggggaagcaaacacatcctcatcacatggcggcagcaaggagaagaatgagagccaagcaaagggggaagtcccttataaaaccatcagatctcatgagaacttacttgctatcacaagaatagcatggggaaaccacccccatgattcagttatctcccactgggtctctcccaccacacagggggattatgggaactacaagatgaaatttgggtggggacacagacaaaccatatcagtaagtatctacataatccatttgtaattcttcccatcccatattcctattacccaggatttgtgtaatctaggagacataaaacttctgaatttgtattatatgtaagtctcttcggtggaaagaagaatgttggctttattttatcattttaatcttagaagattttaaaaccataattcttaactgaaactaagcttattttggcttgttatatataccacataacttaaaattttaaaatgtaaaataccaaaggagttgaaaattatgtccacacaaaaccctgcacatggatgtttatgacagctttattcatcattgccaaaatttggaagcaaccaagatgtccttcagtaggtgaatggataaataagatgtagaacattcagacaataagatgttattcattgctaaaaagaaatgagctactgagccatgaaaaacacatagaggaaaccagtgaacaagcaaatctgaaaaaatctacatactatatgatttcaacaatacgacattctgggaaagcaaaaactatgtagacagttaaaagatcagtgttttccaggggctgtgagggaaatgtatgaatacgtagagtccagaggaattttaggacagggaaattctctgtaatgatgctataattgtgaatacatttcattatatatttgtccaaatccatagaatgcacaacacccaagaatgaacctttactcttaactatggaattttggtgataatgatttgtcaatataggttcatcaattgtaacaaatgtacccgtctggtgggagatgtagatagcgtgggtggctgtacgtgtgtggaggcaggggatatatgagaaatctctgtaccttcctctcaattttgctgtgacgctaatactactctagaaaaattaagttctttaaaaaatgtgcaacactactaataccactatagaaaaatggaaagagtaaagagaacaaatagcttaccgcaaaagaaatataaatgcccaagaaatatgaagatatgctcacggaattagtagaataactaaatcagtagtttttaattttaaatttatttttatgtaaattttacctatcaacctagaaatggtgaatacagtagaagagtcagtgaagtgggcatgccctttcttgttggtgaggttataaatcagtctaatggtttttgaaagcattttggcaatatgcataaagagtgtatttgaccctatgacccagcaatttgtcttctgagactcttccctaaagacatgattaaatagtatggacaaggttattctttgctatgttacttttaagaaaagtggaaatgaccagcaacctaagtagctgaaaaataagggtcagataaacaaatcttggcatatctgttgcaacggaacattaagcacttattaaaattatgttttcaagaatatttagtaagatgaataaaaattgatcacattataaaaatatatagccaatatgtttaatactatgaaatatgtgtgtagaaaaatgaatattaaaataaaatttttcaaaatattaaaacttaatatcttacatgatgaaatgtgtcatgtatgtattttatcttacaaactgctatgatctgaatgtgtcctacataattcatatgttgaaacttaattgccaatatgatagtactaaaaggtggaggacattaggaggtgattaaatcatgagggcagagccctaatgaatgggattaatgaccttataaaaaggctggtgagaaccgagaactaactaggctcttatatttttccatcacttccactatgggaggacacagcatcccttctctctggaggatgcaacgttcaaggcatcatcttcgaagcagagactgggtcctcaccagacacctcaccagcctacagaactgcgaacaattaatttctgttgtttataaattacctgtctcagatattttgttataatggcgccagtggactaagacacaaatattttcttacaacaaagggaaaaaacttactgcataattttgtaaaatcgaattggaatgagatacactgtgttcacaattttaaaaagtttcacaagggcataagatcattatgcttggcatgtcttccttaaaaaaaaatataccatgaagtataatttctaagcattatgtagagagccacctatttctgtctgtttggagtgggcagggtatccacacactattttgaagaggtgcttgcaaaattgagatggaaaaatgtgtacgtacagttcctaaggccttacctggagagtgaattgccctggtttttacaggtaataccacttggaaggaaactcatgcttctccctaaatcagacaatgcctggccttgagtggtgtcagggtcctggtgataatggttattttaacctcctgcttttctacttctagcatattctgcctttggcttcatgcaaaatactgaaggacagcgagtgcatggatactgctttatcgaaccttgttaattggtctctttgctataagaaatacattgtccctgaagccacaatactaacgcgactggttctacatcttaaaaaatctttgatattttacactgtgtctgttacatggctattatgtttaaactcccttgattagattatagaagtttacattggggaagagtatgtaaaagagacagcaattactgccaaaatcttccccaaatcagtgtcttagtccttttagactggtgtaacaaaaataccataaacagggtggcttataaagaacagaaatttatttctcccagttatggaggcggggaagttcaaggtcaaggtgcaggcacgctcactgagcttccaaggcctcttgggcctctcttataagggcattaatcccattcatgaaggtagagccctcatgacccaataaattcccaaaggcactaccttataatatagtcatcttggtgattagaattcaacatatgaagtttgagaagacacaaacaatcacagtatggcatccaaacattacaaagagttatagtttgtctccacagttagcttagtattaaattttcctcatcagcaagataggaaaaggttagttgaggatgaaccagaagttttcacctgatcatattgacatgggtgcctgataatctcatgcctttatgggaattatatgttcttcattaaaaacaaagaattctggcctttgccaatgatggctttaaactagtacaagcattctgggtgtggctgtggtatttgatcaaagctaatatttgctaatttgcatgttcaatgcaacaatcataaaatactggatagtttcaggtctagtttatgcaccacaaaaaagcaatgataaaactcattcatcttcactttaaagtcgttgtgaagtggctgtttccactgggaatatataggtagcatgtaaaacagttgtcttttctggtaaaggggtttcttgctaaggcgtgaccacaaccaagtgattctttctcttttgattagtattcattgtctcttctgagctgtctctagtggatacagtttagaaatttaacataaagaaagaaagagctctcacactgtaggatttgcagcatgctatttaagtgcaactgctaccacagttaaaggatcatcggaaacatcaaggtgaatgggaaagtggagagagtcaaaattcaagaagagacttttatattattaaaatttattcaaactgtaattgtaaaaatggcatggaggaaaagttaaagtcgaaaatatcagcagtatgtaaaaaaggacaatgtaaaacatctaccaattgtcagaatggctagaaaaacatattccattattcagccaaatattcttgcctttacctctccctgttctttacctgtccacccctagactgtatctttcttgcatatttcattttaagattcttgcacataatttagagaactgaagcaactacctagcccatctttcctcactaggccttccttagaatctgcacggagtcaagtttatggcccctttgaaaagctgcagctccttaccaaagttttttcaaatagaagctaagaagggaaggagtaaaagacagcatttgtataaacattagctcatgtaatcactataaccacctatttaaggtagatgatattaatttcattttcctgaggaaacttactgccattcagatcaaaagtcttctgcaaagtcctacaagtaccaaaagaaaaagtcagggtttttacctatatctctctaactctgattatgtcatttttcttttctctcattttggttttcaactatagagtaacataataaccacttactctcaggaaaaaaaaattagaataaaaatttgcagaccttgcttataaagatttaattacatttaaaataaatagagaaaatatttggaaagtttatttttaataatgatgagtttcatttaagttatgtattctctgtacctattatgaaatatattctgtgaagttgtggttatctgatacaggtggaggtggtagacattaagactcttgatagctgttccgcttctgtcccctttctggtacgtggaatcacttccgcactcacttgaagttgagtctggctgtgtgacatgccggatcaatgaaatgtgcgaagaagtgaactgtgtcacttttggacagatgttctaagagccattgaatgttttactgtgttctgttttctctcagacctatcaaccaacaacactcaaaagttggctgctttatcttcctgagaccaacaacactcaaaatgttggctgttttatcttcctgagtgattacagtatgtagccatcccctgcttattaggataggcacagagtatcagcaagaaataagatactaagagaatagaatttgttattactaaagattttcctaaagtgtccgatacgctcaacattgacgattgttttgcagccaaaacagcaaacatatttaagaaatgtgtttaagaatcacatattgaatctgtgattcacatttgttgtgatggtaaaatatttgtgtagttttctccttttttcagcttctattttaaataacataaattgtttgaaattttgttaatggttcttgaaattaaagacgttcagcaatgatatggtcttaatagaaggaaattgttttccatcactgaagattaattaaattttgagtaagaattgagatatgtgcggctaacacagggaattatctctgtgtttctggatgaaatgggattattaaaacatgaaggaactattttcctcttacggtaagagaacagtaacttaatagtgaaaatcagttgatcatcacatgcttgtggctaaatatcagtttgtcctttttgtagctgctgtaatgatatgttattgaaatcatttagggatacttttttgttgttaatttttatggaggtattattgagaaataaaaacattctatatatttaagatatacaacacggtattttgatataattaacatatccatcaccgggcatagtagtctcttttttttgtgatgagaacacttatgatctactccctcagcaagtttcaagtataaaggacattaatattaactacagttaccatgctgtacgttagatctctataactgaaggttcctactctctgaccaacaactccccatttataccactcctggcaaccgctattctactccctacttctataagttcaacattttatattccacacataatatcatgcaacatttgtctttcatttttttctgcccttatttcacatagcatatgtcctccaagttcaccttgttgcaaatcgcaagatttccttctttttatggctgaataatatttcattgtatacataccataatttctttattcatccatacatccacaaacacaggttgtggctatatcttggctattgtgaataatgcagcaataaatgtcagagtacagatatatttttgagatactaatttcatgttcttcaggtaaataatcaacagtgaaattgctagatctcatggtaattctatttttaatagtttgagaaacctccctactattttttttgtaatggctgtaccaatttacattcccacaaacagtgcatgagggtttccttttctccaaatcctcaccaacacgtatttttaaagatacaatgagacaaactttttatttaaaattatagaacaagaatgaatattaccaattcatcaaaaaaaaagtctgtctactatcaaagtctatttttaaactttatgttcttttacttaaatatttttggaaaaaaagataattatgtacactaatgtgtgtgtgtacattcacaatttggcatatactattaatttggtttaaatttaatttggacataataattcttaaaacttgtcagactgcttgataagtaggtattagtgtatcccacctcatctacagagatgaaaactacagcgtaagttatctaaaacagtaagtgtattggatctcaggaagtatcacttcagaggtgttattcttaacaataacactattcagcaaatgctgcaagaataaaatcattaaaataattttctaaacatcaaataagccaaagtgaatgtaagcttttgtgaataagtttagattcagttaaatttctcaaggatcagctaaattttttaatcaaaaatttcaaccaggtactaaaactattttttgtgtcttcctttgacatatgggctatgtatatgttatataaaaccaaataatgggatatttctgattattatacatttgaaacatatcattgtgtctagcttcataacgtagctatcatattttggtaagttaaattgtatgtcaaatgggtgctcagtctggaagactcaaaaactagaatttttcttttttctaaaatttagtaataattgacaaataaaagcatctggtaccattatacttcctacagtctatattctcctatcatgataaaactggaattcatattatattgaaaaacctcttatttttttcttttttcttctttaactacatcctacagtgtaccctagaagacataaattcaaaaatgtgaatagttctgagaggttttcttgggattttaccttttatgaaactgctataatttatagaatctgcttgtgctctgtcacctaaatttaaaaagctgccttttattatttattttttagtttgctccattcagacagtgatgtttcatgtgggagacatcaccacaatggattactttaacttggaataaccttgctttaataattatatggaatacctttcacaagagaaagcattactaggagaaaagccaataaagctatgaaagacatggataaaagtcaacagctgattggatatagaatctaaataatgtgatatgatttaacttacctggatctcataggtaaaatgaagaaatgatagttacatatcagaattcatatagaatatatgtgagataatgcaaataaatattttagtatcatatttgtcacaaaatagtttgtcatcacatattagctcatcccccatggatgtctcttgtcatacggttgatagaattctgtgtccatttgtgtaattttagctccctaaggatagccactatttgtcactcactgttttatctagatagcacagaaactgatagggagtagtcaataactcagtaaatgtttggccagtgaatggatttacaacatccctgtggaaataatggtagatgtgggtctgtttattgcacaccgcaattgtcaggatgtttattgcataaccagttgtcactggttagtctctgtgtttgtttctgaatttgtttagaacaaggctttatttttactaaaaatataacttgagttgctgacgaattttcagtttttactcatttaccttgctgatatagctagctgaatttacatatctatgtcactatttgtatttatctttatctccatatatttatattatatatacttatgtctgtatctctctatatatgtctctttggggatgtgtactgtgtaggtatattttaaccaccagctcagtgagaaagaactcaagctatgattcttagtgtttgcttatttctgtggtgtaaatacttcaaccacatccagtttcaagctatcaacatgatgttgctgagtgtggagctgggatgagataggtagtggccaattattatatagcattttcaccatacagataaaaggatacaaataacctcacaagtgtagacgacagtgaaatgtagtaaaataattaagaagtgatgagttttgaacatttattacagttgctttaatataatttatttaatcataagtttatttaattttaacaagggctatgtttaatagtatgccctcaaaattccttaagatttagcattcagctttcacaatccatagtaaatctttaatttcaaagtctctgttgcttttcattgtaaaactaaacgtaatccatgctttaactcttttctggttgttttcatatgtcctttaaattctcgatgttttgtatgtttctacagtgaatatttgtgagttgaaactttttaaataattcaagaatatacttttgtgtgtgactttgaaattgtatatactgcttgtatgatttctataatctattgccaagggtaataagagctagtcttaaaatcaaaaaggcactatattactctttgattcccttttttttttctcttaatgaagctgaaataactgggcactgaagataaaatatatgttaactagaagagtatttgctataaaataaaaaatttgacacattttggcaaaagttttttttttcggtagtaaacattttactacctagtatcaaatatattaaacttaataaatataagaaaacagagcctacaaatgcaaagtctaaatcctaatttttacctgcaattgttacttatatgagttcatttttctaaattaaaactaaatcaatctactctacctcctattcatggcctctgccactgcagtcctgaaggttggggtgaagatactcacattttacaagtttgtgaaatattaactaaaaaactatggcgaaatataaacatgaacattttggagagaaacacttctgaaatggtagtgtgtagtgtcaggggctccatggatgctgtcccgagtaaaacaactgtaactggtgaaaattgtaataaaataaccatggaaagtctctggaaatggtcttaagagcatatagcaaatggagaaatatttattcaaaacaaaaaaacctgcaaaatctcagtcagaacagtgaaagttaatgacatttgagcaacaatccccaccccaaccccactctctctagctctgtgtgacagaaactttactctggatagacatggccaaaaacagggtgcttcttctacgtgattctcttcttctttttacttatcagcagaagctgctgtggcttatcaccacgtctggtcatagctgaagagatgtggctgcttctgtatctcctgagctaccacacctagcgcagatccttcctctcataaatgagggagaggctaagaccatgaaaatgagaaagaatcatcttttaaacaaacggtgctgagaaaacttgagattcacatgcagaagaatgaagttgaccctttacctcttggtgaggaagaatataaaacgtttgggcagttatctaccttttggacacatacttaatattagctacactatgaattattggtttggggtgagttagtgagaaacgggttccttttatatgtttagcctagaggcaggtatcgagagagggcttaaatgaacatcctacaataaagtttaaatttttcatcctccattgcagctaggtatgatcatgtgacctggttctgataggacataataagaattaatgtgtgaaacttctaggaagagaagtccatcttcccctatcttccttgttatttctcactgttacttggatggcaatgtgatgattggagcttgaatagccatctggactacaaaatggaagttgtatgttgaagaagacaaactaataatataaattgtccaatgtccctgatgatcatggagccactgtactgcctctcaactgtctcttcttatttcagaaagatgcaaacttccattgttcctgatattggttattttggattttctgtcacttgtagctcagttctaatctcaatgaatgcaagagtcactgacaacctgctatagccaaggtactatattaggcactgacaggtctagggtgaaaaagagacatcgcctggttttcacagagcatacttactagtgagaaaagataaaaatcaaatatttaaagaatatgattttgagggataatcacataacctatagtgagtgaatctggatttaagggcttctcaattcaaagaaaagggaaggccactatgaagcagtgatagctgagctgatacatgagataatagacagacctatacatgtgatgatctggataacagaattctatatagggaaacaggaagcacaaagggaggaatggactaaaaaaagagaagcagaaaaattgacttgtgtggttggagtagagagggcaatggtaagagcaacaatgggagatgaggttagaaaatagagtaggagtcaaatgaaacagggtttaataggtgagggataaaagcaaaaccaaaaatatatacttcagaatcttgtcctggcatctgtttttcctccaatcatctcctcctttgtatattttctttcttttttttcttcatctatatatcttctcatttcattcattcaatcacctatacaatgtggtccactgtctccagaatccaaaatccaggattgtatcctactatttttttgtagattttctacattcaattgtacataaaaaactggcctaggaaatccgcaccccatcgtaatttgtattacaaatttaaaaccagtagctctcaaatcaaatttggataagaatcaatgtactactttgaagatcttccgaatatgtatatctgtttataaataacatatattttaaagtgttaacttatgatctttcattgatacatttctgttttataaaacatgatattcatgatagatctattttattcatttcaacatagatattatcttcgctactcttttaaaatagttttgaggttccaacacccagaaagtgttgaggaaaatttgtatcttctaatggtactaaatataatgtaactgactttgagctgtataaaaaaatgattccaaaatgagtcctaactcttggttttaaaggtgatgtaggtgtgaagggagatgtgacaaaaccccaaagattgttacggaagttttggggaagggaatgaaaacaaacccaccgtggtaattactcctaagattgatgaaaatagaaagtcttgtgcagtattagtagtggaatacatacattcttataaatttgcttgagataatgtggacaatgtgtattaaatgttaaaattggcatatataatttgcatgaatatacaaatgggttacatcttattccctaatacaagtgtggtcaaataaattatataagatttataaaatagcaaattatgcagccatcaaattattgaattgtttcagtatataaaagtagaaacatggccagaaactattgaaaaatattacaagtgagttacaaaacaatatatgtagtaggatttttagggtaacatatatcgaagcagaatgtgggaaagatgaagacggagacacagaaaaaactgtcgtttggaaatagtcttcaaataaattgggtgtctatctcttggcaataaaattataagtatttctctttttatttatatgtagctttttccagtgaaataataattattataataaaaagactttttaattcaagacaaaataacgagaacatcagtgtgattagaaggcattacatggggataaatggcagccatgtcatctgcaaacagagacaatttgacttcctatttgaataccctttatttctttctcttgcctgattgccctggccagaacttccaatactatgttgaataggagtggtgagcgagggcatccttgtcttgtgcgggttttcaaagtgaatgcttccagcttttgcccattcactatgatattgtctgtgggtttgtcataaatagctcttattgttttaagatatactccaacaatacctagtttattaagagtttttagcatgaaggggtgttgaattttatcgaaggccttttctgcatctattgagataatcgtagtttttgtcattggtgctgtttatgtgctggattatgtttattgatttgcatgtgttgaaccagccttgcttcccagggatgaagtcgacttaatcgtggtgggtaagctttttgatgtgctgctggattcagtttgccagtattttattgaggatttttgcattgatgttcatcagggatattggcctgaaattttctttttttgttgtgtctcataattggtgggaaatacatatatgttgagaatatatccgttgtttgaaaaacatgacttttatattcaaaagttgtaatctttttatgaagatgcattttcttttttaaggatgaaggaggggtagatgtatttttaagctaggaggaaagaaattcgactttctggcagcttattttgtgaccatgtataaatcaagcaaacaaaagctttcacttatagtaaagttcacttgaagataaaaattgaccaggaattaaagacattgtatgcacttgtctagtttatattacttgagggtggtggtaagatgttttctggcttgtatagcatgcatgtattaaagacctgagacataaagaagcaagtatatttgaggaactaaagtcaagcacagctagaatgaggaaagatgaatgaatcaacatgggttgggggagatatgtaaacagggattacctcatgcagcatcctatagttcgtgtttagcattctggattttataaccaaaaaaataaggagccgcttatgagatttagtcaaacggaataacatcatcatctttatctttttaaagctcattgtgagttcatgtggcagagagactttattgggaatagaggtacttatatagggattggaggatcaacaggctgaggaaagatgaaagaccagtaggaggtcgtagtacttataaagtcataagtgtaatatgattttgattagaatagtaacaatagacactgtttaaaaacactttttagtggtagaatctacgtgtcttgaagcttgattaaatgaaggtgaggaagacagaaatcttaaatgatacaaagttctgacaagagaagtttaataaatagtagttccatttaccaaggtgagaaatatataaggaggagcacatttggggtggaattcgttttgttttcttttgttttttattcatgtcatgttatgtttgaagtggacttgttcagtaagcagcagaaaatatgtgcctggaatatatgcgctcatttaaaagttatttccttttaaataattgctcattctgcagaaaatggctgactttgaatatcagctgttttctttttctttttcaggaaatcattcttgaaatggtaaacatccaagttttatcaaataccaggatataattgcctggtgtgaattattattttgttagtaactataatagataatccacagaaaatcttttggaaataaaagacttgaaattaaaagctatctggaatgttatatttaaggacacagaccttgaatgactgttcttcaagtaaagagtctttgttgacagatatcaaaatgtcttatattatgaattcacctcaacttagaattatgttaaaatgtgtggccttccttgaaacaccacctaaaagaattttcttattgtcaaacaaacacttaaaaaatagtttttgaaaaatgagtaaattggtattgataatcttatagaacatgtgtacagtttttaaaatatattgaatgtaaatagtgtctttctgtgtgaaactaaacaaatattggacacctccaaaaatattttgttctgaaattttccttggattgaaaaaatgactcaaatcccatattctacttacatctttattgtagcatgacttagggctcttctgtgaatgagcgtttacaccttattttaaaaaattatgttttaaaacaatttcctttgaaaataatggttttcaaaggaaaaaaagagcatctagggctcagaaaattttctttatacttgcaattcaaagttattttcctgcagcaatttcttaaatgaagatttttttaattaaaaaaactatattttgttgttgcaagatagaaataataactttgttgttcaaaattgacagagacgagcctaatgacttccttgtctgaccttgtctataaacttggaaacctcacagtctcgtcttcctgttgtcttcggatgtaattttgttggtagctcaggtcatatttgcttgtgtctatagtaactgagcccttttcgactttaggcactgtgcaagttagttggcatatgccacaagaataaaaaataaaaccaacagctattgtctcttggttacaatccttaatgttctaatgacctttctggaaaggtgatatttacgctgagatcctctgaactataaaaattggagggagagagaaggggaagacattcagtacagagaaataacatgtacaatggctcttaagcttcgaagaattagcgaacttagggaaatgatagaggccagcatctgtggagccatgaaatgaggcaggaaagtttgacgggacacctgtgaatctagagtgttttaacttcatcctaaggtcaataggaggccattgaacaatttgaggggatgtcacaatgggatgtacacttgggcattactctgatgctgtttgcagtgagaagaatatagagagggcaagatctcaggagatacagagttttatgttgggtacaggttggccgaagtaaattgtgtttatctatacaataaggttagatgaagtttgcaattgatttagttaaaaaatttcaaaaactggatgaccacataaataggaacagataacctattcggaaatatggcttccccggtccatcagatttcccagtggaatggcacccatgacactaaaggcccaatgtgagatctgcctagttatagaaagtaaaatctttatttttaccttaccctgttcaactgggatattacatcaccacttcgaaagaatttgaactaatcatctatgtgcttccattcaagagaatatttatataaatatctggttttttataatccttaaactaaacctagaataaaaaggccacatcatcatcagtggctcagccagctttccagaaggctggaaagccattcacctcgaggaggctctttcacttttgcggggtggctttgacaagggtagtggcacttatgaaggaaagaaagtagcctcacatgaagtattatttgcagggagcactgacaggctttgcagatgagttgaatggtaggaattgttttggagaaggtaagaatcataaaggattgcctgatgatggattgtggtgtgagtgagctaatattcctaactcagaagcatccattacttaaattaacaactaaggtgtgattgtgtcccagtttagagttcagcttctatttttgcactggcctagtgctctacattctactcctgtctttttaaccgttccttacttttcagatctatataattttatgctttactttttattgatgttgaagaaaaggcatttcttcttcttaagcagctagtatgggtatcataattcagctcaaaatcagttacaaggattttcattgttcaatagtgtaaaaatataataaatatccttgatgcctgtggtgaaatactatcaagcagctaaaaagagtgtattagataagtggttctcaaccaggcatgagtttggccatgaataagacatttgacaatgtctgcagttttttttatcgtaattactgcggaagtggtagcattgtactggcatctagtaggtagaagacagagattctggcaaacatcctacaatgcaaaggacggcctcccccgaacaaacaattatcagtccaaaacgttaaaagtgccacttttgaaaaaccctgtattaattagatccatatctcacaataattatgtaacccaaatatataatattgagtgaaaaaggaaagttgtagaacgattgcaaagcgtgatagtatattcattcttttaatgctagctagcatagcaaaccaaacccacaatttcagtgccttaacacaacagatatttattgtttgctcatgtcacagtccatggcattccatggcagcgtgttgctttcctgcatgtgacgatgcaaggatccagacgtcttccattttgttgctcccccgcatctcttcaacctcagagtcatctgcatacatccatagaatgggaaagaaacagcagagaagatatattagctttttaaaatctgaagctctgaattgacacaaattacttccactcatattctactgggagaaacaaatcaaataaccacacctgcatgcaagaagagctatataatacaattagaggctgaacagcctgtcagcgatactacctgggtatggagtggatcaacatggattcttatggatagctcattagctcaatgaaggatgccaagcactcaagtaaatttgtaaagaacatacacacatacatacacaacaacaacattatgtattgtttatggatataggaatgtatgtgaaaagcagaacaattgagctaaattaatgaacataaaattcatatatcatggcctcttataaagacgagagcaggagaacaggcctggagataaggaagtaaagtgttttcacatgtatttgaatcattttcttttataattagattatgcacaataaattaggacagattattcataattatgatttcctggagatatgtactcattgtataagtctctggacttctctaattttacctttctcaaaagaaaataaataagttgagtaagttggatgtatttgtatcagccaattaacttttatattgatatttaaatgagatataacatctacattattttttacatttatgtaaaattctagatatataaaacaagaatttttataaaagctattgttgttattaaggtatactttggtggaacattgtacagtgttctttatcgtatggtcctattcagattatgtaccaaatgcaatactaatatgctctcaagcttcttgaaaaaaatcctatctacatcacgataatatgttggtaatatttttgttccctgtttattttggtatctcaagtagtctcatcttttcttttagaatatacctgatttttaagtcatcttgtaaatatcaataatgtctttctttcttgcaagaaacagaaacccaaacaaaatacaattcaaaattcaaggtgtatttgtgcatactctggattatctactggtagaacccaagaaaaatttaacctacaggccatgggaatgatggggccataggccatctccatagtggtatgctactaagaatgactcattgcacaaattctcattttatgagtctcaggtaaagtattttaggaagtgcatctgtttgttccaagttgaatcaggcctcaatcttggtccagtcagccttgtcctagaggcaaatatcacacaatacaaacatgatatcaaggactctgcttatggattgtttgactggagggtgatagtcgccagagaagggagaaaaattatggactgagtagaacttcccaaatatctcttgtttagtgtgtttcttgttccacattattttgacagaaagaattctgagttatattatttgatcctccaagtttcaaaatccttacaaacaaaaatgtttttaatgccttcacatgtatgtttctttctatcatgttactttgaattatgaatgcatcaatatgtaatgttacagcattaaatgtatcaagtttgcttctccactacattataacacacacacacacacacacaaatgaattcgtattaaactttttgaaatctatgatttaaatagagagataagaagaataatgactggttcattatattacacaacctatgctttgtatatggttttcttttttaaaaatgtactttgtaagttgagaaaaaaggtaattgacaaaataccagtgtaaattttgaacacaataaaataaaattacatcagcccaattacaaagcaacatgtatgaatagcttaaccaactctcctgttttaggtccttacgtgaaccaaaatcctgttgttatttatcacttattggaaccaaaaagagccacagatgttgctttgaagagcaggatgctatgaagtactgttttaaagaccttattaaacacttcactgaaataggaagtcatttatgtagtcattaatacccctcactgcatttaaaccacagttctcaaaggaaaaagctgctcctctctcacagttttgttgttacttacttttaaaaatcaaagatcaatacctttaatgagaacatattgggaatatctatgtgctacgctctaaattaagcattagggcaaaaaaaaaaagatgatttttaaagtcttttcttttgaattttgaattgagatagaaaaccaacgttataggcccataaaagggcctgtaactggagacaagaagggggaaaggctgaaaaatatacctataccaaatttgaagagagcattgatagtcagtaaatatattgcagcaacattatgaaggtttgtgtaagccatgataaaaagcatagaataaaatatttaacataaaaagtagaagaggctcagcaaaaatttccttctattcacctgtcttaaaaagttaagtatttttatcttgtgtttaatgaagaagaatttggaaactaaaagttccaaaaattaataaatttttggctatgcactgttatgtccttttgttaaaaaacactaattgttgagaaaaacctgattgctctatcatctttttatattcaaaccaaatgtgcttgattaaatgttttagatgtcttattaatagacagtcttgatcttggctaaaacatctatagaaaggcttacgcagtgtgctaggtgcatgttgaactccctgtgttgttcaaactagagacataaatgattaatgaatactttatcatatgttatatgtgtattttatatatatatataaaattatagtcatgtactcatctgtaatttcaagttggtagacatttttgtttgcataattttgacagatttgttttgttttgtcttgttttttgagacagtctttctctgtcgcccaggctggagtgcagtggcgcgatcttggctcactgcaacctccgcctcccgggttcacgccattctcctgcctcagcctcctgagtagctgggactacaggcgcccgccaccatgcccagctaattttttgtatttttagtagagatgaggtttcaccatgttagccaggatggtctcaatctcctgaccttgtgatccacccgcctcggcctcccaaagtactgggattacaggtgtgagccaccgcacctggcctcgacagatgttttcataaaattaaataataaaatacaatctacatattaaagttttatatatttctgtaaattgagatatttttattgtcggcactatttttagttaggttgcttaaataaatactaaatatacaatgaaaacgaacatacctagtacagtcattctactcatcacttggtatagttgatgtttttttttttttttctttgagaccaaattttgctctttgtcacccaggctggagtacaatggtgcgatctcagctcactgcaacctccacctcctgggttcaagcaattctcctgcctcagcctcccgagtgcccaccaccacgctcggctaattttttgtatttttagtagagacggggtttcaccatgttggtcaggctggtctcaaactcctgacctcaggtgatccacccacgttggcctcccaaagtgctgggattacaggcgtgagccaccgcatttgaccaagttgatgttttatttgttattaatttcaaaggctgacatgtacttatgatttcagtagttaccagctactctacacgcagcatggtacaattaaatgtatatttagcttttggaacatttctttttaaaagttgtgcacattttaaaaaccaagttatctgaatcacgtgttaaaacatattaaaacaagactgagaattccatttcggacaagatggcataaactgatttttccctgctcctcatagtgaagaagaacaataaaacctagaaacaaaacaagaggccatcaaaagaaaattgtaaaggatagtcagagaaaagcaaactgctttgagagcctcgcgctagaggaaaataaactgcagcacattctcatatgtgcccctatccaacagaagatggggacccccacctgtcattttccaactttcaagcctagtagcagaaggcagcccagctagtttcctctctgaattgaataggagtctctcagacaataccagatgagcctggtataactggcaagggctattgaatgggagcccatctaacattaagcagctagggtaagtgcctctcctttcccagggatttaggactaccatgctctgctgaaaaatagacaagtggcagtattgtttagaggaattttgtcacagcaagtggcccaacctcggaagcctctttgtccctacaggcctaagacactctcactcactctcactcacaacaggaaatacttaggtggctgggtgcaactgccacaagggattttaccactctaagtggcctagtgcaggaagcctctttgttcctgtgggtctgaggctgccctctattgtacagagatactggggcagccacagggtactagaagagggatccctcaagaacaaaatcccatccagaaagcactgtctgttcccaataggcacagagatcttgccacaagtgtcctaactactgaagcctcttcatacctgcagaactgaggctctcttttccgacaggaagacatcgaggtggaaaggcagaaattacaagagacacaatcataataagtgacctggttcagaaagcatctttggtcatatggacctaggacttctcttccccacccagagatacctgggcaaacacagagcactggtaaggctatccaccacaaagagtgactagcctgggaagcccgttggacgctatggccatgagaatccctccacttttacccagagacattggagcagctggagggtaccagtatagggattctaacacaataatcctatctaggaaacacttttatctctatagatctaagaaacccctactctacctagcagcaccagcaccctagtctggggaactccttctgcccactcagaatgtaccatcaaggatttttgagagtaccagcatcactagataaaccaagcaggcctcaataacacgagaaatactctgaaaataaaactgtctttgggaccacagcccataaaagtagaatggcacctgtgtattgaactacgtatggtaaatacctgctaaaataaaagattgaaataagatccagattctgcatatataatggacaaaatgtccagagtaccatcaaaagtcgcctgcatactgagaaccaaaacaaacaaacaaaactagaatgagaaaagacatcgactaatgctatcacttagataaattagatgttgaaattatctgacaagaattttaaagtagaagtcaggccaggcgcagtggctcatgcccgtaatcccagcactttgggagaccccggcgaccggatcacctgaggtcaggagttcaagaccagcctggccaacatagtgaaaccctgtctcgactaaaaatataaaaattagctgggcatgatggtgtgtgcctgtaatcccagctactcaggaggctgaggcatgagggtctcttgaacccgggagagagaggttgcagtgaaccgagatcgcgccactgcactccagcctggaccacagagtgagactccgtctcaaaaaaaaaaaaaaaatgcaatagcatttatgatttctgcaaagaaaatgaaactcttacatataaaactaacaaaacatgcacagaatctgtatgataaaagttaccaagtgctagtaaaataaataaagaagacctaaatatatggagatacattatgttcatggattggaaaactcaccatagtaaagatgtgaattctctctaagttgatctatttttaagacaattcttacgaaaattttagcaatgtttttgaacttacacaggcttattataaaaattatataggatgtatagaatggcacaggacctatactagccaaaactattgaataaggaaaaattaattagagaaatcactcttactgttgttaaagttaattatatagcagcagtattctagacagtctgatactggtggtgtacagactcatatatcagtgaaacagaatagagagcccagaaatagatccacaaatatgcccaatttatttatttttacagcttaaagtataattgatatacaaaaatctgcacatatttaatgtatacaatttgatgagtttggacatattcatatacctgtgaaaccatcaccacaatcaaataacaaacatcaattccctggaaaagtttccttgtgtccctttgttttggacgaagcaggaatccagtaaggagggttagcctttttaataaatggtgttgtagtaatccaacacccataggcaaaaaacaaacaaaaaacaccttgatctaaacatcagaagaacttaaactgtaaaacttactcaaaaatagaacatatttgggatctaacgttaaagtgttcttagacttgacaccaaagtcgccatccataaaaggaaattttgataaagtgaacctcattaaaataaaaaacttttgctatgcaaaatattctgttaagaagaaatataaccgggcgtggtggctcgtgcctgttaataccatcactttgggaagctgaggcaagctggtcgcttacgctcaggagttcgagaccagcctggccaacatgatgaaactctgtctctagtaaaaatacaaaaattagctgggcgtagtggcgcacacctgtagtaccacctacttgggaagctgaggcatgagaatcgcttgagcccaggaggcagaggttgcagtgagtcgagatcataccactgcactctcaaaaaaagaaaaaaatgaaatacgagctacagactgggagaaaatattggcaaaccatatatctagatatcaagaactagtatcaaaactacataaagagctctcaaaactcaacattttaaaaatccaataagaaaatggacaaaagacaggcacagatgtttcaccaatgaagatatacagatggcatatataaatgcattaaaaaatgttcaacatcaacaaccattagtaaaatggaaattaaaaccaaagtgagatattattacctagtagtcaaaatggctaaaataagaaaatagacaccagatgctggcaaggaagcggagaaactgggtaaatcatatattgctggtgggactgttaaatggtatagccacactggaaaatagtttggcagttcattttcaaactaaaaatggacttagcatatgacacagcaattgccctcttaatcattcttaaaaaaatgaaaacttgttttcatacagaaacgtatccacaaatattcatagcagccttatagtaccaaaacacacaaaaaagtcccttgatatgtaattgcttaaaaaaaaaaaaaccctgtggtacatgcataccatggaatattacccagcaataaaaaggaattaactattggataaacctggtgtaatttatactgagtgaaaaaaaataacaatctctgcttaattttgttgttcacccaaaagtcattcaggagcaagttgtttggtttccatgtaattgtgtggttttgagaggtcctcttggtattgatttctatttttattccactgtggtccaagaatttgtttgcttttatttcaattttcgaaatttattgagattcgctttatggctgagcatgtggtttatcttgcagtacattctgtgtgcagatgagaagaatgtatattctgtggttttgggtaaagtagtatgtagatgtctattaggtctagttggtcaagagtcaaatttaatccagaatttctttgttagttttctgcctcagtgatcggtctaacactatcagtaggttgttgaagtcccccattattactgtgtggcttcctaagtgttttcgtaggtcttgaaaagtacttgatttaggacattggtgtgccaatgctgggtgcatatatatttatgatagttaaattttcttgttgaattacaccctttatcattatgtagtgaccttctttgtccttttttactttactgtttgtgggagtgtaaattaggtcggctactgtgaaaagcagtttggagatttctcgaagaactaaaagtaaggactaccatttgacccagcaatctcattactgggtttatacccaaaggaaaatagattattctaccaaaaatcatatgcactgggatgttcattacagcactgttcacaatagcaaagatgtggcatcaacctacatgcccacaatggttgattggctgaagaaaatatggtacatacacatcatgaaatcctatgcagcaataaaaaaagaaaaaaatcatatcctttgcaacaacattgatggagctggaggacattatcctaagcgaattaacacagaaacagaaaaccaagcaccacacgttctcacttataagtgggagctaaacactgagtacacatgaacataaagatgagaacagtagactctggggactacaatcgaggggagggaggaaggggcaaaggctgaaaagctacctattgggtactatgctcactacctgggtgatgacttcagttgtaccccagacttaaatatcacacaatatactcttgtaacaaacctgcatatataccccctggatgtaaaataaaagttgaaatgtaaaaaaggaaaagcaacaatctaaaatgaatgtatattgcatgtttccatttgtttttgcttgcttgtttgtttttgagacaggttctcactcttgcccaggctagagtgcagtggtgcgattgtagctcactgcagccttgaagtcctgggctcaagtaatactcctgcctcagctttctgaatagctgggactacaggcacacaccaccacacctggcccatttttaaaaattgttttgtgtagacagggtctcactatggtgacagaccaggatccctggtctccagcgatcctcccgccttgacttctcgaaatgctgagattacaggtgtgagccactgcatctggtctctatttgtgtaacatttctgaagtaacattattatggcaaatagatgagtggttgcccgcttgtgaactcctccaccttgagggctcagaggctggatccatagatatagcagaatgtgtttgtgtgtgtgtctatgaaaaggagtaggaggctgagggtgggaaaatgccatggaagcaaaatatgattgagcatgactagcttctcttgtgactgttcagcccaaaatgtccaggagtcataaacacgttgtgaaagaaatttccagggcatgcatctcataaggacgtgtctgcttgtgggttctcaggaaactgcagaccctgccctgcaagtctggcctctctcatggacagtcagagggccatgaggttgcattttttaaattgaggtaaaattcacataacataaaagtaaccattttaaagtgtacaattcaatagcatttcgtacattcacgatggtgtgcaaccatcatctctattttggtccaaaatattttcatcaccccaaaggcaccactgtatccatttatcagttagtccacactcctccctcacccagctgttggcaaccacgaaaccactttctgtctctaaggatttgggtgacctggtcttcatgtcaatggaatcatgctgtatgcagccccttgtgactggtttatttcactcagcataatgtgatatggattgggggaaggtggcaggtggcctataaaaggataacatggggtgtcttgaggtgatggtacatctaccacttgtgttgtgcttacgtgaagtgatctatgtggtaaaattgagtataactatatatacacacacacatacacacacaaatgtatacgtacataaatggtgaaatcagaagaaggtttatggattataccaatgtcaattcttttgatattataccgcagttttgcaagatgtaaatattgagtgagcctccgtgaagggtgcacaggaccttcaacctccctatacaattttttgaaacttcctgtgaacttgtagtttatcaaattaaaaagaaaaattcaaacagccttagtttagatctttaaagcctgatcctaatgaaattaaattcattttcatcccatgtatataatattgatgctcaccccaatgattcgtagattacatatttttgacaaagaaagaaatgtaataggttgttactttcttttttacttacaataccagtatcattttgctgaatttaattggggagctctatagaatacaacttgaaaaatactagtctaacttatgtcagatgttcaaattaatgtagcttagtttcgtgctctctggacttttagacttcatgattcaactaaatttaaaacaagttagaaacaaaccagagatcaaccttgagttgccattttcttactttgctaattagggcttctcaccattgtaatataaaagaaaaagaccctatcagcaccaaaacttggaaggacctgatcacagaattaaaaaatgaaataattaaaaaaaaatactccagcctcttcatgtgtttcctgtttcaccatggcctgatgtgaccgtcatcatgcactggaacctgaatttaaacgcatgttaatgaactcctcaaatggcatttaccgaatcagagaaaacttgaaagaaacttaactagcagtggtccatttgagtaaaaatataatacataaaaggaagatctcttgaattccaagcctgacaaaaatttcatctttattagatggaatactatatatcccattttaagaggtatgcatatgtacataaatcggaaatttgcaagtaatatatgtgattttaatgaacttcaaagaaaacaatcatacaattgtatagtcacaccacatatatatgattgtagtgttagtaatagtgttttctgagtgcaaatgatatgtatatgtacgtaaacatacacagagatgcatgcatatatggaatatatgtgtatgcaagtacatgtcatatgctttcccatgggcaaatgattatgccaatattttcccaattttctaggatgttaacactcagtctcttttgctcaattccatatttaattttagtcctgttgaatcattaggatgtctttcatttagtccaagtcttactaatctgagttccatagtccatcacaatcccactttttctttggaacacttcctaaatagcaaattgccaatgttaagctcccttcttctgaccttctctagcattaattacacgtacctcaggtgttgacacataattatggtatgtctcagcttgtcccagaaatgatttttagtgatacatgaacatacgctatatacttttttaaatagaaaaataattgctgacatttaaaacggatctgaacttttgcttagtattaattctattcctcacaaaatcccacattttctgcccatttttcagatgagaaaagccaaagttaaaagggcttaaagttcgtgttaactcagctagtcagtggtagagctgagatttatagccaggttttctctttcccatgtgtgactctccaccagtattcattgctaattttatgagcaaatttgtagaagcatgtattcttttgaatgaatataagaatgacatttactaggctgtaccatacactgattcaatcaaaccaactaatttgcacaaaagcttaagtgaaatctctaagatttcatgcagcctgaattttaaatttggcatgagataggagactgccctttgcttagaaaacaaacagcacaacacgacaaagacataaacttgccccaatgccattgtgcgggagagcataaacctgtggtgagtcaaggctatagaaattaggttctgtggcccatctaatttgttgcccatgtcaggggccagcatgctgtccaggatccagctcattgctggcttcctcgctatgaaggcaatagtcttaggatccttgttataaacgtttggaaaaagtttctgaggccctcaaatcttcctggaggaggcagatatacagatatagcacataccaggaatctcagtcatgggctcctcgatggcagatcccatcagtagtgtttgaaacacacagtttgtacatcataagccccaaattttgatggctagtactaaaaattattttcaaagttgtatttcagtatttacataactattgagaagtgatttcttttgagagactcaaacaacagaaccttattttagctaatgaatttgtacatgcaattccctaattttcatctccctggcagaatggtttctacactccaccttatcctatagactaattacaaattaaccttactaaatattcatttttttctcacttcttcctttgctcacaaatttctagcatgtgccttacatgcatgcattctagttcagactaagactctgacctttcatgccaccttggatcccaccttatttctcaatattctcaacatgaattttctaaatattttcagcttagacctttaaatctatcaagttataattagtgctgacttggtagtggctaatatcactgtaatacataaagtataatgaagaaaatatgtgtttaagaaatatgaacagtagaattctctaggatttaccatcaaactacctgtgtgacctagagctaattatataaatcctgagcttccattttttccagtaatagggagatgacattagatgattcttaacatactctttaatatctttgacaaaaaaaacttcagttatctgattgcttatcctacttgtgtttgttttgtattctcttatgtatgctgggaaatgtgaatccgtatacaatcactgaattatcataatgagattcatctcctggcactggtgctaagattgagaatttttgctattgatggacagagctgtggtattgtgaggcaatatttcttattatattgcttttgttgaagttagtaagtagtataatcctgaaagcaaaataaaatgtggagccaaacaaattgcctctcatatttacagagggcaggccatgcatattacttcacattatgcataactgaggttgtaaaatactgctgtagtgttttgatgattcaacagttagtgttcttcctcaatcaaagagctgatgttaacagaacttgccacaatacagcatatgctaattgcgtatggcttcatgtgggcccttcaaatataaaaagtcaaacttttagaaaccactcaataccagacattcaaaattctgggtggcagtaagggatatcatttgatatttgaagtcaagaaccggattagattagttagagatgcaggaatatttgcaaggtctgtatgacctttacataacatgatctactggaaacctgtttttctaaatgtttatatgtatgcacattgacatttaaaatgaaaacaatgggatgtaaatcctctcattaagatgggtgccactgactgattactattcttgaagcaatgttgtcctttttcttgcatggtaaatgcttcttttttaaaaaataaaaaagtcattgctatgtataaaatgcatcattcagagattataaccagggttggaagtatcatatttgaactttagcttagacaagtccagaacatgttacaacagggtcactgtttgatgttacattgttgttcagagctcaactgtgtgttaggcctggactgaggacacagtgacaccctttattgctgtattgcacagttacatctcagggtaatgcttagaggtgggatatgctaatatagtagtctaaaatgtgcaatcaataattcaataattatttagggagggtcagataccacgctatgtgttggaaatacagtggtaaacaagactatttttaccctcatggtgattaaaatccactgtttttttttaaattattttaggatttgtcaatattccaagggcctaccgcaaggaagagcaagtgactaaagcttgtttctaatctttctctttttattcactatttttacctttcattttgtctcacagacatgatttgacccagtaatgtctcaattctttcccagaacaatgtggagataaccagatcataaacagctccacctctaattacaatctgcgtcattttcttgtgtgtgtgtgttttttttttttttcattttgatgtcattaccatagggaggaatcccacaatggggcaacaatcaccatcagttcctccacaacatgtggtttcaaccatgactcttgagaaagactttagctctatctcagaatattcccaataatttgatttacttaaactttatggtgcaaataatgtaacccatttcacgattctatctgctttattcttctttcgtcctttttgttctttaacatgtgactgaattataaactgccccttgaattcatatcagtcacaaaataaccttgataattacttcactctacatggatttctctataaatacatttcctctctgatcaataccaaccaactcaacatcgtccaagttctccccaaatccaatgaactcttccttctttgaatttagaacacaaattctatctcatgtatatgcatataagatgtcattggaaaaatgggggaaaagatcttaaagggatcagggaggctgggtatggaggctcacgcctgtaatcccagcactttgggagactgaggcaggcggatcacctgaggtcaggagtttgagaccagcctggccaacatggtgaaaccctgtctctactaaaaatacaaaaattagtcaggcgtggtggtgggcacctgtaatcccagctactagggaggctgaggcaggagaatcgcttgaacccaggaggcagaggttgcagtgagctgagattgcattactgcactccagcctgggcaacagagtgagactctgtctcaaaaaaaataaaaatgaaaaagaacacacatttgctttgccactcacatggtcactattcatgttttaacttaaatcattgaatggtcttattgtgttttcttttttttggtttttttttttttggttttttttttgagacagagtctcgctttgtcgcccaggctggagtgtggtggcactatctcggctcaccacaacctccgcctctggggttcaagcaattctcctgcctcagcctcccaagtagctgggattacaggcacccgccacacacccggctaatttttatatttttagtagagacgaggtttcaccatgttggccaggctggtctgaaactcctgacctcaggtgatctgcctgccttggcctcccaaagtgctggaattacaggcatgagccaccgcgcccagccttgtgttttcatatctaatgtttcatcacatggaatgcagtgttcagagtggagattctaggatagacagatagataattgctaacagtgcttaaaaaatattcagcatttgataaatatttgcttttttttttttagttttaggtaaaattaaggatcattaattttttacacctttgatcatgttaacatataaaagattaaataataggcaataagtagcaataaaataggaagtttagtttttccaaaaagtttatgatacttttattatttaaaaagaaatatataaaataatcacttggacactatgaaaatgttggaactgtaacttagcaattagaaatgcattagatacaaatgctatacagttactttatattcaataaatgttcattgatagtaattgctaattttaagatcttcgagaaaatagatacaatattgccacaaataacacctttttaaatacaccttggaatatcagggttataaatagttctttgtttggatgacaaaagtcttttttctttagccacagctgttgataatataaataattcatttttaaagcaataaaaataaatacagccaagattatattcatttatgtttgggggccatatatatagtttatagcataaaaaagcagtgatcttatgttgaccctttctctaaaaattaatagtttattcagcttcctgtgttgaaattgtttttgtttatatactattcccttatattttgcttatatttgctctctttttctgaagaccaattattgaccataaaattagataatcttggaaggtgttaacatttcctagttgaggacgtgtgcaacgggatggattttgctgccgtctagtttcttctcaagtgtctaagctgaggcgttccctactaaaactcaccactgtctggaaatcaaggcacttaactctctgttgtgagggggttgattgtaaatgtcccaaggtattgcaaaagcagaaggacccacgtagagccatgcaaatgagagtgggtagatacattttatgagtgggtgcctcctattctcagccctggtgatttttagggtggtctcaggtgtgtctcagggtagagaggtatagagttgccattctttgtctgatttttttttttccttgtctattgctttaggataaactcagccttactttactcacagctacaattttggctctcaaaagatagtttgggaaaatgttttaaaaatctgactatttattgtttcttgatgttttcaacccttatacaataattttcttttccttgaatacccattgatgatatatgaaaaaaataaggaccagaaggtgaagtgggaattttaaaagtatcaagataaaaacataagcgttatctcactagagacataaacccaaatattgtgttgatcagggtagagtaaagaaagcattgcccctgttaaatcacttatagctacgatccacttggtaatcattataaatctgtgattatatatatatacatatatataagctccatatgattttatttattatgaccttttattttacgtatatattagactctgaagagccccagggtatttgtcccaagatctttgcaaaactccgaatttgcaaacatcactaaggcatataattctactcataaaatgcagtaaagtatggctaattacagagaccccatcagactcttgatgattgtataaacttaagtcatatataacactattaaaataaaatctactactaaacaaaccacattgtattatatcaccccaattaaatttttaactatgaacttgcctcaatctgaaaataattgtagtgagcgaataatgatacttgctgtgtaataggtgcctggcatgttttctttaaagtaggacacttttatttttaatttcaacttttattttacatacagggagtacacatgcagatttgttaaaacggtatattgcacccagatagtaagcatagtacccaataggtagcttttaactccttccccgccggtccctccccactctagtagtccacagtgtctgttgttctcatgtttatgtccgttgtgctcaatgtttagttcccatttataagtgagagcatgtggcatttggttttctgttcttgcattacttcgcttaatataatgtcctccagctccatccatgtcgctgcaaaggacatgattttgttcttttttatggctgcataggattccgtggtgtgtatgtactacattttctttatccagtcaaccattgatgagcttttaggttgattcgatatttttgctattgtgaattgtgtgacaaagaacataccagtgcatgtgtctttttgataaaatgatctattttcctttgggtatatactcagtaatgggattgctgaattgaatgatagatctgttttaagttctgtgagaaatctccaaactgcttgccacgggggctgaaataatttacattccaaccaacagtgtataagcactcccttttatctacagcctcaccagcgtttatcttttgattttttttttttttttttttttgtcacccaggctggagtgcaatggggcaatcctggctcactgcacctcaacctcctgggttcaaatgattctcatgctgcagcctccctagcagctgggattacagatgtgtaccaccacacccagctaatttttgtatttttactagagtcggggtttcaccattttggccagtctggtcttgaactcctggcctcatatgatcctcctgcctaagcctcctacagtgctgggattacaggcgcaagccactgcactcagcctttcttgacttttaaataatagccattctgtttggtgtgagatggtatctcattgtggttttgcttttcatttctctgatgattaatgatgatgagcatttcttcgtatgtttgttggtcgcttgcatgtcttcctttgagaagtgtttgttcatgtcttttgtccattttttaatattagacttttgtcaggtgcacagtttgtgaatattttctcccattctgtagattatctgtttactttgttgatagtttctttggctgtgcagaagctctttagtttaattaggtccctcttgtcaatttttatttttgttacaattacttttggggacttagccaaaaattctttgccggccgggcgcagtgcctcatgcctgtaatcccagcactttgggagaccaaggtgggtggattacccgaagccaggagttcgaaagcagcctgaccaacgtggcaaaaccctgtctctaccaaaaatacaaaaattagccgggtgtggtggcagacgcctgtaatcccagctacttgggaggctgaggcaggagaactgtttgaccccaggaggcagaggttgcaatgagtccagatcacaccactgtactccagcctgggcgacagagtgagactctgtcaaaaaaaaaaaaaaaattgccaatgccaatgtcaagaaggacatttcctaggtttgtttctaggatttgtagttttaggtcttacattaatatctttaatccaccatgagtttatttttgtatatggcaaaaggtagggatcaagtttcattcttctgcatatggctagccagtgatcctggcatcatttattgaataggaagtccttttaccattgcttgtttttgccagccttgtcgaaggctggttgaaggtgtatggctttatttctgtgttttctattctgttccattggtctatatgtctgtttctgtaccaatattatgctgtattggctactgtagtcttgtagcatagttggaagttctatagtgtgatgtactgtggtgtgaattattgtagggtgaagtactgtagtgtgatgcctccaattttgttcttgctgcttaggatggcttcggctatatgcgctcttttatttttttttttggttgcatatgaattttagaattgttttttctaattctgtgaggaatgaccttggtagtttgataaggacagcattgaatctataagttgttttgtgcagtatagccattttaattatattgtttcttccaatgagcatggaatgctttttcgtttatctgtgtttctttcaacaatgttttttaatactccttacagagatctttcagcatcttggttaggtgtattcctaggtatttcattttctttggctattgtaaatgggattgtgttcttcatttgactctcagcttggtcattattgttgtatagaaatgctattaatttttatatgttttactataaaaatatatttttatgtattgtatatcttgaaacctcgttaaaattgtttatcagttctagtagccttttggtggagtctttgggttttctaagtatagaatcataccgtcagtgaaaaaagatagtttgacttctttttctatttggatgcattttatttctttctcttgcctaattgctgtggctaggacttccagtactatgtttaataaaactggtgagagtgggcatccttgttttgttccagttctcagtgggaatcgttccaacttttgcccattcggtatgatgttggctatggatttgtcatagatggttcttattattttgaggtatgttccttcagtgcctagtctgttgagggtttttatcatgaagggatgttggattttattgaaaacttttttctgcattaaaataggacactttctgtctatgcttagcgtcttgtttattcttatctactttttacttgatgagatgtttcttcgcaattaaaaatatttaagtgacagtatagccacccatactttttattacagaaataaaaaatgcttcgtctctcatctgtcatttgatgaaaaaatccaagactttcttctaaaacctgcaaacatcataattcatatttgtattgcctccaactatcttctttcaagttaaccaccctttcaactttcactaaatctttaactcctatttgacgaggtattgaacgctgtactcaatgaaacacttttgcagcttctcttttggttatttatttttctttggttttctatagagaacataatggggttgaataattcaaaaatacaaactcttgctgatttcaacattgcacttttaattatattaaacttgtacttcctgggtcaaaaatcatctacgttgtaagactctttactttttctacctttttattgccagccttgtcagctatctttagggtagaagaagtgggagagatggtaaagcaatgagttgtgatttatttttctcaaaagaggaaagtttgcttcaaatcaaggaaatcaatacctacataaaaataaggggaggccaaggctgatttaataaagagaaagctagagtttcatcttgaatctctcactagcatagcgacttatgtatgaacctcagtaaatatcaatattctagacatagtggggcttcggtgtttctcaggaatagtcagacacatcagtatttaatctataatttaataaatccaagggtcttcttatctggaataaagctgactaaataatttagttgcttataaagcactaatatttagtactaaaatgacctgtcaatgttatttacatttattttatgttaactgaaagctatgttgctgataaagcttatattaagttcaggagttttaacgtggaattctattaatatggactcttaggactcaaagtgtttttcattaaatatcctggaacgtatgatataaaaattgagagatttatctttacgtattttgttctgcccatattggtattttcagcttattttctatcacagatttacatgggccaagactgaatcatagaatgggatattggaatttaatatagtttgttgatgctatggaatcattttttaaattatcaataacttattggatcttttattgccaaagtttcctaggatttcaattgaaatgcaaaaagaagaagtaaaagacattaacgtaaattctcagcagtttatacaaataaatttacaaggggcctatggaacaatacatgttggttttattttcaattgtagcaaaaaaataaataaataaaaggtagtttgccaacctctagagtgttgtaataatggcatcttttgacttttggagatttcatggaaattcttcaggtttccaacaagagccctccgggtgtgttgaattcatctgtacctgtgacagtcaggatctaggcaaaattcagaaaaacagtgagtacactaaatatagacttgccaagtctacagttctttagggaaaaaaaaattcctggactcagcctaaagtccccctaagttttagaggtcagtaatatttcaagtgactagaaaatctgaactaggtacatcatctttgttctcacacttagtatgattgttctcaccaagcatcattgcttttctcctttctgcataatttttccttactccttgattgccctttcactcttatgtgaccataaacctctgagtttccataatgtagacatgaaatttaatggactacattatgaaaatatttttttcaatgtcatcataatttctgtgccaggataacaagctcagaatatgggagtttatagtccagcatctctcccacaacctactatgactgtaaagaaattgtaacctgctccttatttccttcaatgctaatttctttgaaaattgattatgaatgccctccaatcaatatatgtaaaaaaaaaacctttatctttactaaaatacatatcctccagattcataacgaaggagaaaattctttggggaaagaagagtggagacccctcagtttcaattctgatccaactgactttattttgtccctagggttattttgctggttggtggcttaacattctaatcctagggtaaactaggacctgccttgccccttaacaacatgtgtaatcttaaatctggcccagtcaaaagttttaaacaagactttaggcggtaaaaactgaaagagaaataaaccaggaattaacaatgaactgataatttttgctgatgaactaccacttggcttacagagattagaacacatctttctaatcttatgacacaccaccctaggctgagagtcattctagcaccatcttcgtcacctactcccttgaaaggtacatgaagttttatttcctttcaaaattttatttttttatttttggtttcttgtttttagaattattatctggcaaggataggactttatccatggactcgacagtgcatttattttagaaaaggcgtgtatatttgtgcaatttatcctagcagagtaagttccaatatgtatatacaggccaaacaatgactataatatgtacatttttcttcattaactgtgttgattgcctgtgttctttcatccagcagaggcaaagtactaacatagaagactatccaaagtcttccagtagacttgtttagactagatttgaaagaagatcttaagtgtaagattatttttatactgttttcaacttgtatatttgtgcaatttgttgaacaaatgagaattagataaataattttaaaatataagtactttatgagtcagtttcccttttttgtaagttctgtttcccagacgtgcaaagcaatataattcttattatttcagggtataaattaaatttaacctgagcaaacaacttcttgtatgattgtattactatttttattactattatttttagagagactgatgacattctatcacttggtgtcatattcatctttttatagatatttgactaataatatgtaataatagtattatgaatggtgcccttaagtctgatgatttgcttaaggggctaaagaacaatatataaatggaaatctaaatagcactacttttaaaaagaataaacccatagaaagaaaattccatagctcaaaactaagaaactcaaaatccatataacacagaaagtaaaagggagcagttttctatatatatatatatatattttttaaaaagctctctgactctggttaaggatgcttgtgaatctaaaatgatgcatgttgataaagcactgtaatttaaagaagtctccagtcttgcctttaacagcaaaagcaagaacacattaaatatataggatctataagagaaatgaataaaaaatgttcaaatggaaatggtaaacatacagactagttcttaaagataggtcatgtatattcattttctaatttaaattgagctattttgatacatgtatatattttattattatgaaatatgtcaaacaactggaggatgactaaaaataatattaatataacattttgccgtacttgattttagaatggtggtaccaatttatgcctccaacagtagtgtatgcatcccccatttttcaaattcttatcaactagatattgacactttataatttttatcaatttgatgagtatgaaattatatctcatttgttttttgatcaatgtatcttttatattcattgaccctttattatttcctgctctgaatcatctgttcatgtcctttgccaatttttcaattgacttttggtctatttcttattttcatgtaattctttaggtattacagtttttccctttcactcatcggtctctaaataaacttggaaataatttttaggggtttttttgtgaatagtgaataattttgtgaattattttagagtaaataactgtcctaccatcattgtttaaatgtctaccttttctctattcacctgtagtgtcacctctgttttgcatcgagattagtatatacatgtacattagattagtatgtacattagtatttctgggcatctttttttgttctgttcttcatttgccaattcctgtgccagtactataatatgtctcaattaccatagatttatatttagccctgacatgtggtagggccagacaccctaacttgtttttcttcaaaactttcttagataaaccttgccctttgtctatcatcagttctataaaattatcagccattatctttaaatctggcttctctgcaattccattcattctcttctttaggaactcttattgtcgtataatattgtccatcttttatgtccttagtattttatttttaacatttacttgcctccctgtgttacgttctggatgaattcttcattagtatcttctaattcactaattttatcttcttgttcaatccagatacttaagctgtttatttctttaaaattgattcatttactacatttttcatttccaacatttatagcttttttcttctcaatatgaaattattttaatttctacatgcttttgttttataactacttgttctttttattgagttttatcttttaattttattgttgagaattctaaacatattatttaaaaatgttcttcagacatctatatgagaataatttcatctagactgaactcatggttgaatcattgtggttgtggtggtggtggtggtggtggtggtggtggttttctgccttttttaggcctttatttattcacagatttctggagcatttagagtaaaagggtttgcttttattgtcattgtgtttattatatctgttccaccactttgctgttgtccccatctggcccctggaatagctgcctagattcagatagtctactaccacgtggagtgctgtttgtggtgataattaattagaaatattgaagattcagtactcaaattcatttgttttgggctgcttctgccttcatggcgtgtgtgtgtgtgtgtgtgtgtgtgtgtgtgtgtgtgtgttcttcccgtatctctagtgtaacagattcctaacataataggctctcaggcagcaggtcagcaaaatttttaagacatttttcttttcaagaatgattgctgggtgaacttttgccataacttgtgacttcaagcagtgatcttaattctagtttatcctgtacatgtggactcttagtgaaggaatctaaatgcgaagccactacccatggggggaaaatagtctgtcaggactgcagctactgtgtctgatatgtggaggtgccaagattgtgtctaagtcctactgtgttataacactctttctttttttatattttctttcttattcttctatatattaaataagtgtcaagtcatgaaatttccatgccatcttaactgaagaggtttaaatgttttatatttaatctcccgttatttattgactttacaatgtcaaattaaaactcacattcaggcatatactactaaaatactaatagaagacaaactaggatcattatgtttagggaaaaatacacacatactatcatgacacagtacaattaacataaaaccaaacaccagaggtttctcttattaaagctgaattttaattgtttttatgtatctatattactgtctataatacaggttcttgagaattaggactgctgttgtgtgtgtaagtgtggatcgcttttgttgtaatttttgatcatacttctggaaactagcatgatagctggaaaacaggtccacaaatattaattgaatcaatgactgtttaggagacacacaggcatagatgcagcttctgtactacagtaccttacaacctatcatcgacaaaatacaaaggcaataagtactttttaaaaatatataattgtataaagtgatgagcaagaaaacagaatgaataagaatgtgtaatagtaaattaatcccatttcacttttgataggcttttatataaagctgatacaaaatactttttaaattctcagtgaggcatttgatgagtttcctaataatatttatgtaaatataatagcaagtatacaatcttctctatattttgtaacagtaatgactatccctttaaaaggtatctatttgattcagaggttattatttttctcttgtcttcgctaattttaattctctgatgatgttttgagaacacatcacttgaagatttttagtagggcagtgctgttgtctatgttactgaaaagtaactggactggagaatgtgaacatgcactcctgttcagtatttggattttaggagtgtgtcgctgattcttgaagaatttttttaaaatctttttaagaaagcatcattattgttacttaaaaatatttacctgttaagcacctcttagaatggccaaaatccaaaacactgacaacatcaaatgctgaccaggttatgtaacaacaaaatctctttcattgctggtgggaatgcaaaagggtacagcctctttggaaaacaatttggcagtttctcacaaaactaaacacacacttatcatatgatctagcaattgtactccttggtatttacccagataagcttaaaacatatccacacaaaaacctgagtgcaaatatttataattattcataattgaccaaacttgtaaacaatcaagctctccttccataggtgagtgaatgaatgaatgaacaggtacatgcagccaatagaatattattcaggacctttgaaatgagctataaagccatgaaaaaagaccaacaaatatgggggaactgtaagtgcatattactaagtgaaagaagctaatttgaaagggttacatactgttgaatttcgactatgtggcattctagaaatggcaaaactatgatcacagtaaacagatgagtggtttcagtggttgccaggggttgcggcaggaggtggaatgtatagacagattacagaagatctttaaggcagtgattatatattatccgaaatgcttgcgaccagaagtgtttcagatttcctttttttttttggggggggggggcgattttgaaatatttacattacacttaccagttgagcatcccaaatctgaaaatttgaaatccaaaatgctccaatgagcatttgctttggacatcttatcagcacttcaaaagttttgaattttggagcatttgaattttagatttttagatttgagatgttcaacctgtatgattctatagtggtggacacatcgttgaatacttgcccaaacctatagcatgtacaacactgagtgaaacctaatgtaatctatggactttggctgacattgtatcaatgtaggctcatcaattgtaacataccattgtggtatgaagttttgatggtgggggaagctgtatgttcgtagggctagatggtatatgagaaacctctcttccttccacttagtcctgctgtgaacgtaaaactcctctaaaaaacaaagtctatttttaaaaaaacatttactaggacaaaacatgtttttagcacaattttttaaacgcacagtaaagcgccatatgctcatgagcttcctttggaagcgcccatcttcaaacaagtatattaagataagttttgtccatatcatagcaggtattttattttcccattctgcatatatttaacatggtaattaattcagcctggtattactctggctgttattcaaagcctcatatatgtttgctaatttgtcacttgctcctcatacaacatcttaactatttaataagcagttaccaaagtctagacagtcctgctccagcatgagttttaattgagtatgtactacataagacaattaagatccgaacaaaccatcagcggcagatgatcctacagttatgaggaaagcttctgtaggagtgactgtgtaaaatgatgaaagcaaagggtcttggaatatcatatatatttatatcagggctctaaagacatactaggataaagtggagaaaggcatctctagggctatcttctgtcattttgttgccagtcgttttaccatcaaagcaatatttttagaaaaaggtttccatcatcatttaccaatattttagggaatctttaaagtctaagaacaaatcagaaggtaataataatattgaaaaattattccaaaatgtttagtacgttgtttgtcttgtttcatcaaaactatttgtagtagcagaacttttgttggtggttctgtaactgatgattagctttcagtgcaagtatttttcaggtaactgtgtgaaaatatttttaaacatttacactatgtttccaaaccggaacactttggtatagttatacctgtgaaataaatgacattgtgtaaaacaatatagcggatcttttaaagtgagttgacaggatgacagtacagttactcacagttcaaactaccacaatatagaatgtaatgagccataatgctattatttttcacttcagaattttaatattgtgttttgtacagttcttaaaatgtcatgcataaaacattgtgctgaaacaatagtgatttgtatatttattacgtcagtaggacccaacagtctaataacgataggaaacaatggaaatttttcctcagacttttttggaaactggttacacaaagaattgctttgggaaggatctaatgtttgaaaagcattctggcttgatctttagatacaacagtttgatcttttgtgcaactgagagcctctatataaatgcagctggagtgagtagggtatttgaggctatggcaccttcagtgatagggtgatttttgtcttactcatcctcagtgccaaccagaaaataattacattcctctaatagtgaattgaccactaactaaatctgaaggacaagaagcttggaaaaatataactgtgcaaaatggcttatcgaacttaccattttatagaagttgaacatggatctctaataccttggacttgcttctaatatggtatcacatagtttcatcaccgtgattactaatggatggagtgatatattttatttccaagtattaataaaacagcaaattatcataattgaataagaaggatgctacattgcatatttaataacgtatatgtgacactggacaagtaaggatgaattaatctcttggaataaaccaccattgaaagagcgtttctgtcaagtaatgtcatttactctccttattaacaaacagagcaattctgttggatcacttagcatggtgagcttattaggaaaatcacattggtttcagcaaaagactcatgtgacctttctaaatgaaaatagcatgatgctaaaaaaaattggagggaggaccatctctacatacagaatggtctttgcaatcaactaccatattgagaaaaaacttttattttttatgtttagaatatagaagggtttctgtttctcttttaattaaaaggaacgaaagtggtatttacattaaatgcaaatagcaccttctttcctacagtgagtgtttctcagaaatggacacattttcccttctcggtctccagaaaccccttgatcacaccaaaagagcaagtatggctttctgaaaatagaaaaattgtaggtaggttatacttacagtccctgaatttttgcacatatcgtaaaatggtgactagaattgttcaagatgtgttactccgttacacgtttacaaaggggctgaagagatatagatgttgcattttattaatactaaagaagaaactcagttataggaagtaacaggaaaaatgaatagtggtctgcatagtaacaatatcataatactgtaaagaagaaacattgcacttgccatttaataattgagaaaatctagagtgaattattttgagtaagatacacttactattaattttttctaaaatgtatttctctaactacatgttagttcaggtgaaacaaaaaatgagaatttaataaatgtttatatctgaaatataaaattaatatgtaaatataccttcttttgagatgacaggtgtacattctcggttgaaaagtaggtttctattttaaatcaagattaatgtatagtttatgattaatttaaaatataaatgttatatttcctctcatcctagaacagaataaaaagattttgaaggatttgtattaatcaaataagctagaagccacgcttttctaggaaaaatattaagagaaatgtaaccatgcttgacgctaggatggtgttaccatcaaactaaagcataatttcctctttctgtgactgttgaatactaatttttaaacattaggaattgtctattatactttattatatcatgactactcaatgttttgacatgaaattgtccctaatatatttgctaatatttgaaactagttcaaaattatctggcaagaaatttgtggctttatccatatgatgtatagcatgctagcttgtctatgcagaaggacaataattagacaattcagagaaggtgataatatttatagcttattatagaaatatatgtaaagactttcttgattgtaaacataaatattataaagtataactgagcttttgagattatcaggaaaccaaagtatctacaaaatctaaactttcactcaaacccatggtcagactgtcaatactaaattgaaaaattagactcctacacaagttgtgaagtttttctttcttcatgcatatgattacagaaaggcaggtatggatggcctaatttgtggaataaatccaaccacttttgtaacagctcagataacaaaaatcactaatagagaatgtgatattttatcaaattggctttgtttttgtttttattgtagcattgcataagatcaaagaagaaaataaatgattcaattaaaggaaaaatactgaaaggcaggacacagaaaaagagagttttagatgtggaattcttttgagagatcatctagtctgtttacagatatgaaatctggggaaacacagaggtgaattgtccaaggctttgcagttattgaagcatcaaaatcatacatatatcctgcttctaaacctccctctcagtgttcttttcatctatggttttaaaataatcaagtggtatttgttaagaagttagaattttaagatatggattatataaatccgatttatatggtcaagtttgactaatattagtaaatttgattgttagcaacataaacatttctggagtacctttcctataaaatacggatgacaatctcctttagcattgttattccgtctgggataaaaagcacttcccacatttatttagaaatgtaatggatgtgttcatttaactccaatgatataataattctctattgactacattcagtataacagtgatgtttatttggaattccccttggacttccacttagatttgttaaatatgaggtgatttgaatgacttaactaatgacatttgctcaatgtcttaagtttttcttgatagttggtaaatatctgttcatgatcaagagtgttacaccaagaatttactttcaatagagtgccatagatatcacttactgtgcattctctgtgtttatgtgtaaacatataatagatattcaaaagtaatataacctctccacattataaaataatgcacaaatataaagaaggataatatataagaaaataaaatggtgtaattgcacacgtgaggtgttctattttatgtcaaactatttcttaaaatcattcaaatatcttttaggttactaaaggagcttttgtcatatgaaaatcatatgaatagaccatcacattttgcaataagaagaaaaaaaaatttaactcatgaaatcaaaacctttatccaaaaccacctttgttcctcaatcttgtccaaattttgggtttttctaaacaagttttaataactcttattattttatatatttaccaaagcaatcagtctgtataagatttacattttagcatgctgttttttctctgatttatttctttcgaatcatcacatcaaataataaatcttaaagttgtcaattaaaattgatttcaaatgttttgtatctccccactattataagaactatattgtgaagtctatatcaaaatatagggggaaaagcctaaggtcgcaagtgaaaattttttttctaagacacattcaaaaatttgctaaccatttttgcatatctctaatttgccccagaccccaaattttaggataatgataaacttttagaatttgttaatacaatttttataattgaatatatcatatcttttttcaagtctatgttttttaataaacctgagagcaaatatttaaaatctcttttaaaagcatccaaatcgtaacaaaaagaactgtacagtgtaaacaatagtgtatgctccagacaaacaaagccttgtgatgtgaaataaagcaaatttgtgtataattaagcattaccagtactgttaaaatataggtttataaactggcaagaatatcgggaacatattctcagatattcaaatgcaaaaatggaaaatatttcatttttaacggtgaaattttctgctaactgtttacaaaataatatgtacttatatatagaaatgagtataagctattttcttttaatggctagtttctcattaaagggatcatgacattaggcatattaagagtttagtttggaaactattttaaaatattaataaagagctattgctaattaatgatgggattttccagttttatacatgaataaattactattaaaataacaaaaattgataactaagaatggggattagagtttgaaaaatttcattagtatttatggatttattggtttccctcattagagactagatgaccatcagagacggtgatatttttacttcataaccgcttatacctgttgtaaaatatcgagaggccatcagaattttgtcacttagagaagggactggaaatttttttaggtattcttttgccaagcatacttgctctatttaatggatgagaagtaaagctagacagattttcttcagttaaactttcaatatctccacagtctacagtacattaaaattcactcattgaaatttttttgtttgactctataatgataaatgtatctatttttagcattaataaaatggatgaagctttaactctataataaattcttccactttaaattctatacagcttgtctttccctgattctctagttctattaaattagtagaagtagttcgtgtcttcataatcaattgttatcaagaactaatatgtctaaataaacctgtagataaatgtccattcattattcttggtccataccaaagttccaattattatttgcagtatgtacctgacatatacatactaaaatgggttcaagtatagtttctcaataggaggtggatccttttattgatacataatagttgtacatattttgaggtcacataagattttgctgtgtttatgtaatgtataatgatcaaatcaggataattgggatactcatcacctcaaacccttaggagatggatactctcttgatgttcgatatttttagttttactttgattttatttttgtcatggcctcatttcaaactgactcataatccagaattatccaactaaatcataacagaaagtattattggctaaagtgaatcaagaaaaaatttagcattgttgctgtcatatacaaacatgtaagaagtttctttcacattttaaatataaatataaatgactgattctgggtttttcccttatgaggaaatacctaagcaacattaagctaagcaaataaatggttatttgtgtgatgatcttctaaatgtgtgtgtatgtatatattgctttaataaaaatttcagatggtatatcattttttaagtagcgaaattatcatagtgacttgtgaatagcaaaatgcaaaccaatgtggcattggatcctctccaggatgtgatgagtcacctgtcaccccccccattcaaccccaaatcccctacattctcagggaggactagttcttcctaaggctaacatgaatgccacatgttttaaagcaaagaatgtagaacatcaagttttaaatgtcatgtccattaatgagattagttaactgtccctttgcaagttcaaggaacaaagaaagccctgtggagagcagagagaagacagataggtggctgttaatgataagaggcaaaatttggtaaagggaaggcaacttaagctaaaggaagtgagtgaggtggatagaccccactaaaagacaaaaggagatagtacttaagaaaaaaatctgtcagtatctctctctggtagctgccttgtttttgttttgttttatttttgtttgttttatgctttcctgtaaatcatctcaaaatatctgactgtagcttcctctttcactcatttcattctgtaaattgtttctcaataccatgcctcttgaacacgagaaaacgctgtttctagcttcatcttcaagatatttatttccatttgtaaaaagaaagctgaaacatttttataggctacctcagagattatatactaacattttagtaacatgttctaaatgcttgagtagtttaagtattgacataaaattgctttctatttcagttggaattgtttgaatcctcagtaaatgtaaactattgtagctctaagggtatccccaactagaaagttcttatttcacacattaacatttgctgctttcttcacaagttaaactaaacatattttccttatttatttatttcactggaattcctttaagacattattttctcaagatgtggcccacaagccacctgcactgccaaccacaggttttctcagttggtatctctggggagaagaatcccttgatagtataaaaaatatccaatataccattatattaaaaaactagattggtcatatatctactgcatataacactgatggtcatatatctattgcatgtaacactatatacctgaataccagataaatgtagctcgggaaaaaaggtgaattatttcatgtagcaaggagtgcagaggtagcttttctgtcattggtttaggcatctcaatttcactccattccaggcagtccctggcagaaaaagaacaggatcaacatgattagcctggccaatcatgatttgttctttgggatgagtacattgcttgtgcacagtctcccttgatacccgaatggaattggagttctgttgacaaagaggaggaaactggatgggcaggtctagagtttatctggaatttgaattgtgcatttttagacatagagaaagaaatgcatttttagacatagacaaagaaataagtaggttttattatagtacgcactaacttaggtcagtttctatgtttctgtgactttcttaatcttacataattacctttatcttattaattaattaatttttatttttgctacatgaataaatacattcaagagggcacacaataaaatatagtaatatataattccaaagtacgggctcagcaagtagaaaaaataaacaccatgatttgaaagcattgatgtaaaacttgatctttaccattgctaattagtcagccagaaaatatatataggaaatggcttagccctacatataaaatgtgattctcattcttagggttatctatgcatcttttatctggtactactttttatatctcaatatttgacatcttttttgccccatttcaaaatataaatttatttattttctttacaactgcattcctctgcacaaataaaaaatatataatttagaatatatagtagagttttgataattatatttatattttaaatggttttgatatgaatagttacttctattctccacctgtttaacaaatttgatatttggaggcaaatttccatatatttgaataaatatgatagttaagaaagcattactttctatttgccaaaacttaccttgaattaaaaatagacaatacgtatttatatatgtgtttgtatatatgtatatatgtttgtgatttgtaatggttttgtatatgtgtgtcttctaatacaagggtccccaacccctgggccaaggaccggtactggtctgtggcctgttaggaacccagctgcacagcaggaggtgagcagaaggtgagcaaacattactgcctgagctctgcctcctgtcatatcagtggcagcattagattctcataggagagccaaccctactgtgaactgcgcatgtgagggaaataagttgcaggctccttatatgaatctaatgcctaatgagctgaggtggaacagtttcaaccccaaaccacaacccctatacccccagattttcacctcccccaaacccctgtctgtggaataattgtcttccacaaaactgttccctagtgccaaaaaggttggggaccactgttctaatacacacatacacacacatacatacatacaagtgtacattgatatatatatatatatatatatatataatgaatagtttactactatgtgggctattatacagaactgaaaaaagaaccacaacaacacaaaacaatatcgatgaatgttagcagtataatatccaaagaaaaaaataaatccaacattataattcaaaaaacccaatattaaatccaataaatttaataaaaatgtcagatggtgcattctctgagtacagtatcccttgatacctgaatggaacatactacatggtaaatatcatctccataaagccaaacatattgaaaataaaattttagtctttaggaataatatgtgtgtgtttaataaacatataaaaagaaaagaaatgatgaagaaattattcaaaactgtgttacttcatttggggagaggtagggaatgtttgcaaaagtgcaacatgattggacataggttattttcaattccttgcatttttgcaggagtaaggagtgtttgcagctgtttcctacgttgttaaaaatgggcaggccaagagtgcaatgtatctttaacataatgtcgtaagtaatatcccaatcaaatcaaatttatgtaagtatgtcttatgaagtaaatgcaataatgatatggggagcataaatgctacataatttgaatttaaatgagagcaattggccaggcatggtggctcatgcctgtaataccagcactttgggaggccaaggtgggcagatcacctaaggtcaggagttcgagaccagcctggccaacgtggtgaaacccggtctctactgaaaatacaaaaattagccaggtgtggtggcagatgcctgtcatcccagctactagggaggctgaggcaggagaatggcttgaacccaggaggtggaggtcgcaatgagccgagattgtgccattgcactccagcctgggcaacaagagcaaaactccatctcaaaaataaataaataaaaataaataaatttgagcgataataaagggtggttatttgggctttgtatggaaagttacttattttcatacagctttctatacatacaaatttctgtcaataacaagattgaagaaacatagagtaataaatacaaccctctgcattctgcaattttcctaattcaaagttacattttcacatgctgaattgcatttattggctttatgtttaatactaagcttggcacatactatataccaaaaataattttaattttcaaattgttgattttttaagttgttgccaatgatttatctaatttgctcatgattctggatcaatcatttctgggttgtttcagcaaatcgttaagaacatatctaaattagagttatatattattatgtatagctgtatcatttactgaggaattactaacaatacttttcattttctagataaaattcaattgataggataattttctcttcctctggtaattatgccataaataagcatacttctaacatttattcctgtgaaagatggagagtattttttaataactacattcatgaatgtcactttctaattttcagagtttctggtctgtaaaaaaatgacaattagttttactaaaaataaaatgtgagaataaaaatgggtgaaaaaataaaatagagcacacaacatactcctatctgtgaaacttgtttttaaaacaaaaataaaataatgataatttcctcatagaaaaaaatggaaaattaggatttttaggtgaaaaattaaaagttaattttcttagaaaatattatttattctcgcggccaggcgcagtggctcacgcctgtaatcccagcactttgggaggctgaggtgggcggatcatgaggtcaggagatcgagaccatcctggctaacacggtgaaaccacgtctatactaaaaatacaaaaaattagtcaggcgtggtggcgggtgcctgtagtcgcagctactggggaggctgaggcaggagaatggtgtgaacccgggaggcggagcttacagtgagctgagatcgcgccaccgcactccagcctgggccacagagcgaggctccatctcaaaaaaataaataagtaaataaataaataaatacaataaaatattatttattctccattatgagcatgagtcttacagtatggcaatcacttgtatttatacagaatggacataaaaatgaatattttgaataaccaacttaatttgagagtaaattttgatataacttgtcatagttatgtaaattattttagggtagttgataattgtgttctatgaattaaattcaactatcatgcaacccagtcttaatttaccaacataaaaatgcttatagcatttgttagttaataaatatacttcatttgcatctacagctgtgcataaaatcactattcaggatgagtcacatatatttttaaatatctatcacaagtagttagtgcaaataacttaaaacaaaatatattttctgaattagagtctatgagaaattttagccacattaagtagaccaatttgggattaaataacaataacaacaatgataataataatttatccattgaatgatatttacaattggttttatagtagaacaactataagatacaattttcaatacacttctcattcttctaaacatatggagtacagaagttaaatatattctaggaattgtactaacagagtattttatatttcaatctcaaaaattaaaaatatttccccaaagctaaatatgataaattttcaataggcaaattgaatgaacatgtatttgctactaaattttaagaatataagaaacaaaatatataagaaaattcaggttatctgttacattgtaatgcttgtaatggatgtgacggataggattttggttagtttatcaacccctggctgtcttacttaaaggactgattcggaatataaaagtttaactacatgtgatgtgacttgagtattgctcccaagctacctttaactggactcaaggaagaagaaaccatattcaactaaaattgataaaagttcattttcaatgtagaataattcatttatcattcagtgttcttgaagcagtttaaggctttgtttaagtactaaaacagagtttgaagaccgagataattggccgggcatggtggctcatgcccgtaatgccagcactttgggaagctgaggtgggcagatcatgaggtcaggagttcgagaccagcctgacaagcatggtgaagccccgtctctactaaaactacaaaaattagctgggggtggtggtgtgcgcctgtaatcccagctattcaggaggctgaggcaggagagtctcttgaacccggaaggtggacgttgcagtgagctgaggtcgcgccaccacactccagcctgggcaacagagcgagattccatctcaaaaaaacaaaacaaaacaaacaaacaagcaaaaaaaaccaaaaatgaaataatttctctaatttcatttaatgcctgagagaatgattcttatgtataaatttttaaatggctacttatagacattgatacaattatactttattctgttcatcagtgtcctaaattgtcaagtaacagaattcactatctctagggtaaacagtaagggccacactaaagataatatcaaagactcttggggagcagaagaattagaaatggtggcaaagagctaggagcaacattagaaacacaacacagccaggaaggcaacgatatcactggaactgtataaatgaaacaactctgttgccactgttagcttgttgaccctgatgatgctgaggactagatggcagaatggtcaccacagcaaccccagggaggcccaggtgtgttctgcactggccagattagactaaatgctcactgcctcaggctgtttagtactgtatcttaatatcacatcaggacatttgatcagtgaaacaagtttctcagatattccaccttgaaaaagcaggattcataattgagcatctatcaaatgtaatgtacgtatttaaaaacgattaggtcacaaccaatggggatatgtactacatttcattaacatatattgaatactagttcaaatacttctaacattaattcctagagtattaatgtaacatgtcagtatggaaaaaaattccttcatgaaccctgaaattaaagagtctacagtttcagttttgtagtgttcctagttacagaagctagatttttatttttttacaggaaaatacattaggttttgggtacaacatagatcatattgttattcagttttcattctgttcttaatggattacaaaaatatgttcagtttagcaaatttttctttaaaaatgtggaatcatgcaaaactcatcaacaaagttgtaaatttacaagtattacttctatgatacaaagtagagtctactgactatttagaagtagccactgcattcatttaaactgagattctagcacttcatgcaattctgttaaaattcatagttgttttggccagccagttctctagactgaggcccatacttggacttcatcacaaatcattcataacttcagcagaacaagacaacaacacagaatagatctagttcaccttctaaattttccttttattttttggtaagtgaataatggaaaaattataggtttagtgactgattattaacaaagaacataaataaatgcaacatatgtagttttattaatttcatcagttttgactattcagagtgagtgtttctattcactttccaattaactcccagctttttcctaagaatgatatttcgggtagtgatttttctttttttttttttacttttcagagccctgaaaaaatagccattaacagttactttaactatcagtacaatgtataataaactagtcttattgaaatgcattagtttaaaacaatactgaaggagcaaaaatgtctatatttaaaacctcactccagataaacagacttctgttgtaataaaagttaagctagcttattttatgtttaaaaatatggattaaatcatgaacaggaaggaagtcacatatttgaaaatgaaatatacaaatgatgtgcttttttaagtggtagcaggaagaatatgccaaaaagttgtgtttaacccatttctcatgatacacttagaaaagttatttaactcacaaataaatgctgataatttgtttcaaaagcattttatgcatgacttgaagacactagggcttgtcaatatatattaattgtatagcaagttataaaatgaagcttcattgaattctattaggtcacatcaaaatacactcctaccagataaattcttccatttcgttttgtttctatggcatttgggaagctcagctgtgctcaagaaactctgttcctgtaaacaggttagatattaatgtcttctttattagtcttcaagagaagtaaatctgagaccttgcctactcagttaaaaaactacgaatcaaatcaaacaatttattcacaattgaccatttcggggaaaatcaaaccaagcaaaaggatcatttgaaatcaaataactaaacttgcaaactcagagtagaaatagcttgagttgaactcagccttaaaaatatttattttacttttttgttatgtacttgtatttgaccaagctaacctgataccatccttatatagttctgagcaaactggtatagatatccatttacttttttcagattttatcgtaatcatattgttttcggaatcctttaaaattatataaaaagcagcaacactttaattttgctgactttctcacttattaataagatccaacttatataatcagctgtctataccagtggttgacagaagtatggcattttcttcaataaagcaagaattatactggatggggaaaagttgaaagcttttcctctaagatctggcacaagacgaggatactcactgtctccacttctattcaacacagtcctggaagtaattaggcaagaagaataaacaaaaggcatccaaataggaaaaaaagaagttaagttatccctgtgtgccgatgacataatgttatagaacccctatttttatttttaaaaatgttatttgtatatatttaaggaatacaagtgtaattttattttagggcattcatcacctgaataatatgcattgtacacattaagtaatttctcatcatacaaccccctcccatgcctccacccttctgattccccattgtcaatcattccacactctactttcaaatgtacacattattttgctcccacatgtaagtgagaacatgcagtatttgtctttcagtgtctgaattgtttcacttaagataatggcctccggttccatccatgttgttgcaaaagacatgattttattccttttgtggctaaataatgttttattgtgtatatataccacattttcctcatccaatcaacttaagtaaattctatatatttgctattgtgaatagtgctgcagtaaacatatgagtgaggtatctttttaatataattatttcttttcatttgggtagatacccagttgtgagaatactatatcaaatggtagctctatttttaattcttagagaaatctccattctatttttcatagatgtactaatttacattgtcaccaaccgtatttaagcattgtcttttctccatatccttgccaacatgtggagatttttttgtttatttgttttttaataatagccattttgactggtgtaaaaaattccaccaaaaactgttagaaataataaacaaattcagtaaaattgcaggatacaaaatcaacatatcagtagcattcccatagcaatctatctgaaaaagaaatccagacctgaaactataaaaattctagaagataacattggaaaaacccttctagacattggcttaggcaaggatttcatgaccaagaacccaaaagcaaatgcagtaaaaacaaagataaatagctggggcctaatgaaactaaagagcttttgcagggcaaaaggaacagtcagcagagtaaacaaacagacaacacacagagcggtagaaaatcttcacaatctatacatctgacagaggactaatatccagaatctacaatgaacacaaacaaatcagtaagaaggaaacaaacaatcccatcaaaaagtgttctaaggatatgaatagacaattccctaaagaagatctacagatggccaacaaacatatgaaaaaatgctcaacatcactaatgatcagggaaatgcaaatcaaaaccacgatgtgataccaccttactcctgcaagaatggccataatcaaaaaatcaaaaaacggtagatgttggcatggatgtggtgatcagggaacacttctacactgctggtggggatgtagactagtatacaaccgctatggaaaacagtgtggagattccttaaataactaaaagtagaactaccatttgattcagcaatcccactaccagatatctacccagacaaaaataagttattatatgtaaaagatacttgcacacacaagtttacagcaacacaaagcgcaattgcaaaatcgtggaaccaacccaaaggcccatcaatcaacgagtggataaagagaaactgtggtataactgtggccacaaaaaggaagaaattaacagcatttgcagtgacctggatgagattggagactattattctaagtgaagtaactcaggaatggaaaaccaaacatcgtgtgttctcactgatatgtaggagataagctataagaacacaaaggcataagaataatacaatggactttggggacttggggagaagagttgggggaggcaagggataaaagactacaaatacggtgctgtgtatactgcttgggtgatgggtgcaccaaaatctcacaaatcaccactaaagaacttagtcatgcaatcaaataccacctgtaccccaataacttagggaaaataaaaaataaatttttaaaaaatcccatttacaatagctacaaaaaatacttaggaactggccgggcacggtggctcacgcctgtaatcccatcactttgggaggccgaggttggcggatcacctgaggtcaggagtttgaaaccagactgaccaacgtggtgaagccctgtctctactaaaaatacaaaaattagcctaatgtggaggcacacacctgtaatcccagctacctgggtggccgaggcatgagaatcgctggaatccaggaggcagaggttgcagtgagcagagatcatgacactgcactccagactgggcgacagagcaagactctgtcctctgtccacccgcccccacaaaaaaaggaataaatttaaccaaagaagtgaaagacctggaaactgtaagacattgatgaaagcaattgaagaagccacaaataaatggaaaggtattctgtgttcatgtattggaagaattaatattgttaaaattcctacactacccaaagctttctacagtcaatgcaatctttatcaaaacaccagtgacattttttacagaaattggaaccacaaaagagcttgaagacccaaaataatgttgagcaaaaagaacaaaactggtgtcatcacactacttgacaccaaaatatactacaaagctatggtaaccaaaacagatggtgctggcataaaaacagacacatagaccaatggaataaaacagaggccagaaataaatccacagaattatagccagctgattttcaacaatggtaccaggtatatccaatgcgaaaagaacaatcttctcaataaatggtgctggaaaaaatagatatccacatgcagaaaaaattagacccttatatcagaccatgtacaaaaattaactcataatggattaaaggcataaacgtaagacctgaaactataagactaccagaaggaaacataagggaagtctccatgactatgatctgggcaaaaattttctggatatgacctcaaaagcacaggaaacaaaaccaaatatagacaaatgggattacatcaaactcaaaaagttctgcacagtaaaggaaagaatcaacagagtgaagagaaaacctacagaatgggatgaaatatttgtacaccatacatcttataaggggttagtagccaaaatagatcagtaactcaaacaaataaatagcaagaaaacaaataacccaattaaaaatgagcaaaagatctgagcaggcatttctcaagagaagacattcacatagccaacaggaatacgaaaacatgttcagcatcattaaacatcaggtaaatgtaaataaatccacagtgagatatcaactcaaacctgttagaatgacatcaagaaggcaaaagataacaagtgttcctgagaaggtagagaaaagggaacccttgcacaccgttggtgggaatgtgaattaatataaccattattgaaaacagtaggggctttctcaaaaaaattaaaactagaactaacatatgatccagcagtcccactactggctatataccgaaaggaaatgaaatcaacacgttgaagagatatctgcacacccaagtttattgcagcacattcacaattgctgagatatggaatcaacctaagggtccatcaactggtgaatgaataaaagaaaaaatgtggtatacgtacacaatagaatactgttcatccatgaagagaatgaaacctgccatttgcagcaacatgaatgaacctggaggatattaagttaaataagccaggcagagaaagaaaaaataccacgttatcttactttatgcggaatctgaaaaggttgattttaaagtagagaataaaatgttggttaccagaaggtgaggtagttaagagagagggaggattatgaagataacggttaaataatacatatttacagttagatatgagaaataaaatcaagagatctattgtacaatatggtgactatagttaatgatgatacggattgagtattccttatccaaaatgcttgggacctgaagtgtttcagatttgggattttatggaatgcttacatatacataataaggtatcttgggcatgggacccaagactaaacacaaattcacttatgttttcctgcactttatacacgtaactttgaggtaattttatacagtatttttagcagttttgtgcttgaaaaaaagtttgcattaaatacttatatgtccaattttccacgtatgacatcatttcagtgctcaaaaagtttcagattttggagcatttcagagtgtgtatttttggattagggatgctcaacctaatttttttcaaatgaaaaatactaagagagtggatgttaaatgataacatgtgagggaatgcatttgttaattagctagatttaaccatatcacaatgtatatgtacttcaaaccatcatgttgaacacaataaatacatacaattctctatgttcatttaaaaaataagcttgaaaacaagaattttacaagtttgattttgattctggatttttttaacttagatgcagacatattatctgatcagggcgaacagaatttagcaaatcattataaaatctttttgaaagtaataaaggaataagtaaaggtattgccctccttttttttccttaggaaatgtttagattggtccttagctttgtttcttgttacacctgtagaatatagctgttgcatacataactgtgtctaaataatctggggttcttgttaaattttagagtctgtttcagtaggtttggaatgtgcctgacattcgacatttttttttttttttttttttttttttggagacagagtcttgctctgtcacccaggctggagttcagtggtggctggagtgcagtggtgggatctcggctcactgcaacctccacctccggggttcaagtgattctcctgcctcagcccccagagtagctgggattacaggcgcccaccaccacacccagctaatttttgtatttttagtagagacggtgtttcaccatgttggccaggctggtctcgaactcctgacctcaagtgatctaaccccctcagcctcccaaagttctgggattacaagtgtgagccaccacacccggccagtattcaacatcttacttaacaagctcatatataacggcgatgctgttaattggtaagtagcaagggtgcatgcaggcaaagttttctcagtattgatggaagccctcacttaaacctagatagcatttaataatttgggttattggtgtcctatcctttacttagcagatttttaacatgtcatctggtaaccatggtaaagattatgatactaaaagcatatgttttagggtttaacgtcacaggactttaaaatctcggttatagctttggacaaaaaacttactaaatctcagttttcttatctgcaaaatgtgaataattctacttacacaatactgtgttaatggtttattcaatcacaaaaagcatctaaaatgccccacaattatcatgtgaatttagaaatactagattccttctacacatctacacacagacacacacattaacacacacacacatacacacacaaacaggggggagagagggtgctgtataaggaatccacaagatatgcaaaatgaatctggtatttctaaatatgcatgatatttgtggggcagtttagatgcttcttgtgttttaataaaccatcaacccagtattatgtaggtattatcacttgtgtgtgtgtgaatattcagacacatcttttttcaacatcttcaatgctggagcattgtgtgagctagaacccagctaagagagggaggtcttcaaagttgtaaaacatatgtgctcaagtgagtacaggcatcaaaatgaattcaagagtaccctttaaaatgctgcatgtcatatacctggttatggcttttgggaaaaattctaatttagatccctttccaagtggcacaccatagtgctttgcaaatgatagactcaagaaggaataaatgtattccggctgaaagttttgtcatgggacaattttatgttacataaatggaaattcatttggaagtgacagggaggttaattttaaatcaattcaaaagctatgaatcccttttggcaactattatgtttagtttaaaagaactctgtaggcttattatagataccatgttaagcttttgttgtgcacgtatatgggtgtgtagttcacattctcagtttttattactaaatttttcaatacaaaaattaattcattttaattgacaatcaagtacaagatatatcaaaatcgagcaatacatattttcattttgtatgaaatgtgatgtatatcgtgaaaaaattttaaatgagaacagtaaggttttctatatttttaatatatccgtgcccacttcacaaatagaaatgaaatgccataatcttcatgtatgagaaatattaagttcattcctatattcagttgctattgcccagtggtatgaaagtcctacctcaaaaaggtgtagccaaagaaagataactggcggggcactgtggctcgtgcctgtaatcccagcattttgggaagccaaggtgagtggatcacttgaggtcaggagttcaagtccagcctgaccaacatggtgaaactctgtctctactaaaaaaatacaaaattagccgggcgtggtggcacacgcctgtaatctcagctacttgggaggctgaggcagaagaatcgcttgaacctggaaggcacaggttgcagtgagccgagatcgcgccattgtactccagcctgggcaacaagagtgaaactccatttcaaaaaaaaaagagagaaagaaaaagaaagagggagggagggagggaaggaagggaggaagggagggaaggagggaggaaggggagggagggagggaggaaaccaatggcgtgcgttttatattatttggaaaccttatatttgactcctctaaaattcagaaatggttttatattgtacaaccgtttccctcaaatatttggtaatggggctgacatagtctatccttacttcaaagtagtctgggtttttgctcgctggatgcatgaacatgttgagatatttaatcactacttcttgtgtcacacttccctctgtcacagttggatggggaatgagctgataaaatatacataattaatagataaggtacattgaataatattacaaatacatgtaactggaagaacaataacactaccacccggtccttccccactagcctcaccatttgggagtttttgctaggagagaaaagtggttaatcctcactagcttctcacctcagagattacagatcattctgccctggtgtttgataaggcctccaaaataaagcaaaaagcttctgccagctttttgtgtaggcaaagtgtagtcatctttgtggtaggtggttctgtaaaggacctgctatttacgcctctgttccccaccacaccccacacccaggaaacaacttgaaagaggaaggagagtccggacgcggtggctcacacctgtaatcccagaagtttgggaggccaagttgggtgggtcacttgagatcaggagttcaagaccagcctggccaacatggtgaaaccccatctgtactaaaaatacaacaattagctgggtgtggtggtgcatgcctgtaatcccagctacttgagaggctgaggcaggagaatcactagaacctggaaggctgaggttgcagtgagccgagatcgcgccattgcactccagcctaggtgacaagagggaaactttgtcaaaaaaaaagaaaaaaaaaaaggaaggagaagccaaatattggcactcgttttgcttaatactataacggacaggcgcagtggctcacacctgtaatcccagcactttgggaggccgaggcgggcggatcacgaggtcatgagatcgagaccatcctggctaacaaggtgaaaccccatctctactaaaaatacaaaaaaattagccgggcgtggtggcaggtgcctgtggtcccagctactcaggaggcagaggcaggagaatggcatgaacccgggaggcggagcttgcagtgagccgagatcgcgccactgcactccagcctggacgactgagccagattccgtctcataaaaaaaaaaaaaaataataataataataataatataagttggccagcttggcaagttttgcaaactttggaaaatgtttctcttcctcactatgaattagattaggctgtccttgctaattaatggggacccatgggagatggcgctaatctgggaggagcagattatattctaagggtacaggctcttggatcaggctatctgggattaaatctaccattgactagctgtgtgaccttgagcaaccttgaggttgctaggtgtgtatcacctctgagactcgattgtgacatctataaaatgttgataaaataagtccctaaatgattaaactgttgtgaaaactatattgctgtatgtcattgaatctaagaaataataaattgcaagatagaccattgttgtgtgtaggactaacaaattaaaaaacaggatacccctaaacgctatacactaatgattttaagacatattgattttagaaatgttaaaatgtgaaatgtcatctcagaatcaattaaatacagtagttaattctgatgagttgcttagatcaatacttggcatatagtaaatgatcaatgtttcctattatggggtggaatttccctgaaggaaggcagtcatttctagcttgaaaatggaggccttttagaaaggaagcccatagccttcaataggaaagagtaagaataggaactggtgcgtgctcacaaaaaacgttgtgtaggggttaattttttcctgcttttctgctacacaacacaagaccaagccattgttagtatagagtttggcctttctccatcccttaacgtaattctcttagttacccccaatcccaaccctccagtaaaggccagtattcctacagaactctctgatggagttgtggggactataagggtgagtagtaacaggaggagagcctgttccatgtttggtgtggggctgaagcccatgctgaggggcagcagcacactaggaagagccattgtccagtaaatggacaattgtccagtaaatccatgtggtgacaagcttagcgaacagtggcctgggcgaaagaatcactgagagtggccaggagggatctaaacccagagaagtgattacccaatagacttctgacttaggagtaaatgtgagaagcaaaatctcttttcccagaattttacaaaaaatcgactcttggaatggcagcggtggctaatacttaggtcacgtagatgataaaattataagacaatatacataatctagactgctgttcattgaatcatgtcagtgtgtttgccacatttcttctaaaagaacatttttcatattttatcatttctgcaatcagtagtagtaataataatatctaacacatacaacttagtatgttctgggtggtattctaagtgcattgtcgatattaagtcatttgtaactcagtgagttagcaacagttgttatccctcatttaacaattggggaaactgaggtgtgaaaaattttcttctccaaggtgtcacacattcacaaatacacacagacacacacacacatagacgcacacacaaacacacacacacacccatctattaagtggtagaggttggcagcatgatcctaaccgttgcatgctcatactattttacaagaccatatgatctaaaatctattggtagcttagaatttatgtaccgctaaatatgtacatctattgtgtactcacaaaaattaaaaataaaaaaataatttaggatatctgttatggtggttaaattgtgcctgcagtgcaattccaatctaccttcctgcgtcctgggaactctgaggaccggtatagagcaatgacaggaagcaagggctctggcttcatatctgcattggaatccaagctctgacacaagctaagcaagcttgagaaactttttaaaagttaaacattttattttcaaagagttgtagagttaagaacagttgtaaaaaataatataaaagatcctatgtgaaatatcctgtgtggcttttgctcggttatccccaattgtaatatcttgcaaattatattcaaacattataatgaggattttgttacaattaacctctctaattcagattttcccagttttacctatactcatgtgtgtgtatatatttagttaaatgcaatttttacacatgtagattagtgcgtccaccacgacagtcaaaatacggatgttacatgaccacaaagatctctcctgttgacctttaataaaatcatcaagcttcctcttgtcaccctgtcccatgcctaacatgtggcaaccattaatctgttcttcatgtctataattttgtcatttcaagaatattatgcaaatagaattgtatggtatttaatcctttcgaactagcttttttcagccagcataattgcttaatgatccatctaaattgttgcatattgcaatagtttgttactttttattactaatatatgttgctgatttatttatggttgtggacatcctacagtttcaccattcactgactgagagatattgttgtttacagtgtggggctgttactaataaaattgctgtgaaccctaatgtacaggatttgtgtgaacataagtcttcatttctctgggataaatgcccaggagtgcactttttggactataatggtagtctcatatgtcgtattgatgttgtcgtttatttttaaatttctttttcattgacaattaatatttgtttgtatttataggttacaatatggtgctttgatatatgcttacaatgcagagtgattaaatcaggttaatgaatctgttacctcatattttttttgtggtgaaaatattaaaatccactatttcagcaattttgaaatatatgatgcattatgatatattatagtcaccatcatgtacaatagatcactaaagcttcttcctcctacctaactaaaaattcgtaccctttgatcaacatctttcttttcccggtaggacccttccgccatttctgtggtaatcttcattctaatctgtatttctatgagttcaacttttttagattctgtccatcatcagatgaataaataattaaaatgcagcctccacctgctgggtttaagcgattctcatgcctcagtctcttgagtagctgggactgcaggcgcccgccaccatgctcggctaattttttgtatttttagtagagaaggggtttcaacatgttgaccatgctggtctcaaactcctgacctcaagtgatctgcccctctcggcctcccaaagtgctaggattacaggtgtgagactccgcacctggctcctttagcttttaagaagagaaagaattgaaattatgattacaaccaagtgaagttgaacttgaactcctaattagaggatggttctgatgttaatttacgtaaaggaattgtgatttttgtttttctgctcccactccaatccgttttttcccacacagaatattcccaactcttccttcttgaacctttgtaacattactggcattcgtttctcttatccataagctctaatcatccaatgtttcttcttgctgttattatattgaacaaatatttattagatcaatcaggaataggaagaatagataattttgttttactttcattttttccttctctaatgtacttcctttctttatgtagatctaagtttctgacttacatcattttctttttctctgaagtccttcttttgacatttcttgcaaggcagatctactggcagcaaattccctcagcgtgtttgtctgataaagtattcatttctcttttacttttgaaggataatttcaccaatacagcattttaggttggtggatttattttttctctctaaattttaaatatttcagtacactcttttcttgctggcttggcccaatccattttatgctcttttttgttctgctctgtcactgtgaagctgacccctataaattgcatttccttagctcccttgccgagtagtctcctgttggttttggccaatggaaggcataaacataagacagaaaggcagaaagagagcagatctgggacattccttttacattgacctccactctctttgtgccttatttcccaccatggcagcttatatctctaactatcctgttaagaatctcctctatggctctatctcttactggatttagaaaatcctacttccttcacttgactcttcaggcatggtaaggctgggaaaggtatatcacaattgcctactggaggttgtctctaggtgcctcgatagccccttttggtttctttaagcccattcacacctctgaaagtagttcctttgtactgttttattgaaccatccatgttgaattctatttcttgccagggacatggctgataaagggagataagaaaaatcagtaacttctccctttgaagtaacaaagtataagatgaaagtaaatgaaactcatagttactttaagaaaatgcgtttgtgtatatataaacaatttctacttttcatgactctatctggtggtttttagtataaaatactcactagaacgtgagattaaagtttgccactccatactgatttgcatatggactgttcgctcaagaagtaagggttgaagaaattggaacgacttatcatttaaatcaggaatcatatgacaattcaactggtgacaatgtgccctactttctaagagcccaagttgtacatatgattgcttgtgtatgtatgtgtaagtcactccacgcacatatgcacgtcacccttgagttctgagtttacaaaactaaactaaattcagttactaaaaatatcaaatttgtgtaattttcatgtatttctatgcaagcacatcattactgaaaggccctattatactgttgcaaaatactcatgaagtaccaaggtgcctgattccaactgttatttatttttttttttttttggctattatgttcctaacatagcacataaactagctcattttctcatggtacttaactaaggatacttttttaaaatctagagtattacagggtctttgcatacctacctcttaaactgatttgttttggattctggaaaacttagcacgttggttaagtggctgtgaagaaattttgatgtatacgtccacctcacatagacctaatagctatgtgtttggctagtattttgtggaaacaaataattaagagcaagaaaagttggatttccttaagaacactgaatcgcatagagattgggtaattactggagacaaaaaggcctgtcaataaaggtcagatatatgcaactccctccttttgctgaaaatctattattccatgttgaattagatattaaaagaatattatactttccaataattatattgttataatgcaggggatatatttctcaccaatgactctacatccacaatgtatgatgaaataaaatatatatttatttttaaaaatgcctttagggttttaagatacttaagaattcatttcttgttcacttttaaatttagtgctcttagttctaagagtttgtcatctgttttatgatacaggttaatactgcaatataagcaaggaccagtcttcattttacaacatgtatcataaaactgtaggctaaagaaaagtaattaaaaaacactctgatgcatgactttaatgtaattaaaatatattttgcattcatgaaaaattacaggtctctatcaatccctctataaacaattataatcttattacttaaaattatttcaacatcatacacatatggtgtatatttagctatagtcgtttaggtttttaaaatctgctttcttttctaaatcataattttagaccttttgctatgttcgcaatctttgtgtaatcacatgcatagcagacaatagcacattgtaagtatattagaaatatgaaaacacagtctaatctcaatgcaaaacactgttgaaaaacacagcatgataaaaaattaacttataaatggagagatatactctgctaatggattggaatactcaacatggtaaagatgtcaattatctccaaattaatctatagttttaatgccatttctactaaaataccagcaaggtctttttagtagacttggatcagcttattctaaatttatacggaaaagtacaagcctgataatagctaatacaatcttgacaaagaagaataaagtggaaagaatcactccactaaatattaaggcttattatgtagctacagtaatcaagacagtgtggaattgggggagagatagacgcatagttcaatgcaatagaatagagattccagaaatagacccgcacaaatatgtgcaaactcattttttaaaaagttgtgaaagcaattccaaggaggaattttaacagcctttccatttctatagccttttcaacaaatagtgtgcgttttttctaagtgagtggtgtttgagcaagtagacatctaaaggcaaaacaaacaaagcccacccataaatatataagtaaataaatagagcctcaacttaagtcttatgcaaaattatctcaaatgtcaaatataaaacataaaactacaaatattttagaaaaacatatgggagaaaattttgtgactgaggcaaagactttttacactttacacaaatagcacaatccataaaaaagaaaaactgataaattggacttcgttaaaattaaaacttttgatctgaaaaggatcctcttaagaagtgaaatacaaggtacagaatgggagaaaatatttgcatatcagttgcaaaaacagggactatatacgaagaacttagaaaactcaaaagcaaaaatccaaaaataaattaattaggaaatgagccaaaggcacgaagagacattttactgaatagtatatataaatgacaaacatatggaaaagatattaaatatcactagacatcaagcaaatataaattgaaaccacagtgagataaaactacacatttttcagagtgtctgaaataaaaaatagtgacactaccaccaaataactagcaaaaatgtggagaaatgggatcactcgtacattactgaaaagaatatcagtctggaaaatagtttggcagtttgttaaaaataaacaaacactgtgtatgtttaccactccagcctgggcaacagagtgagaccctgtctcaaaaaaaaaaaaagctgaagaaaaatttttttaaatggggaatataggtggaagtgagagcctgatagcctaatatactttatcttttctaatgtatttaactgctgctcttatcattgcttctatttaaaaatgtattatatttttgctaaccaaccttctaggagccaattgtactctcagatttccccgttttcatactgaggttttatcgaagtagcccttctccaagtccctcccctttttattttaaatatagagattttaaactatttctaatcttactctcttctccaagttcctgaaggtattacctcagaatatgaaaacccttaaatgtacctcatttgctaacgtggagagagagacatgtaccttggaagataatttgtgatggaaaaagcatatgcctacacacacacacacacacacacacacacacacacttaaacttgggttcaataacatattaaacttgggttcaataacatcatacttctcaatattccaaataaagttaactctaaagattcaccataagattttcaatattttaaaaatgtttaaggaaatataaatgctttaggttgtttaggttgtttagacatctattaaacccagaatatactttaagcactaatctttaatatactatagattaaaagctatctttcaaataaccagacttcacaatgtttaaacattttataaaactgaacagaattttgagacataaaccaatataaaactttttttatcctcctctaaattcaatccatttgtgaaacctcatttaaattcgaatcaaatattttctctgatttccattaacaggctctgactctcaggcttcagtgagtaagtatattcattgtggggctcagaaaattttgaaccaaattataaatggtgtttatttgtgttttctttccatttctttttaaggcattctgtagtgaggtattcaaaacaggatgccactcaaagactctctctctctctctctctctctttaaaaactattagagaaaatagcatgtgcagcttcatctgctacataaatcctctcaaagcttctctcctttccagatgatttgagttgtcaggaagcaaatgaagcttaagcttttgggcccctttatttcatagaagtcttcaaaaatatgtgcagaactttcatataatcacgtgctcgaaaaatatgcacaactaagaatagcctcgagctttaggcaccgcaatcgttggatcttctgttcttatcaattcttaccaattgtttcttaggatgacacattaaaccttcagaaaaaccttatcaggatgaaaacttagccttgccatggaaaaaaatggtggttttaagaacagagtaaaaaaataattctaacagggaggggatttttttcttttgcttttttaaagaaagaaattaggaaaggattttaatttgagcctacaagtttgctgaagttgcactctaaaatgtcatccacatagatttatattgttttctttactctttcttgtgtagtaataacttggtctaggctttcaataaataaacttatgaaacagttttgagtattaacaataacacaatggcactgagagcctgtttttacaagactctaaatattttatttaaacgatacccagaattctgatttgcatatttaaaattttcctgaattagataattcttttaagtgtgttacgttatataatctagttgcagtatccttttaacaaaaaaaagcaagtgcaacagtgttaaacatgacattgatgccacctaatctccatcaggcttcacaatgtagttttatcttatatttatttgtatgcacgaatgtcagtgtcgtatggcaggagtctgtaaactttggctcataggctaaacccagcccactgtcttttaaaaaaaaaagatagatagataactgtaaattcacatgcagttgtaagaaataatacagaaagatcctgtgtgccattttacccagtccctccttaaggtaaagtcacagaactatagaacaatattacaacaagatattgacatcagcacagataaaatacaggatatttccatcaccacaaggatcactcatgttgccctttcatggtcagacccacttttttcctgccctcaggcactccttaatctctagcaactactaatatgatctctatttgtataattttatcatctcaaaagtgttatgtaaatgaaaccctgtattatgtagctatttaggactagccttgttcactcagcataattctctggagattcttccagatttgtaatgtgcatcaacaatgtgttcctttgtactgctgagtagtattccatggtatgaatatgccagtttgattaaccatttgcctgttgaaggacatctgggttgtttccagtttctgcctattacaaatacagctgctatgaagactcatgtacagtttttttatgagcaaattttcatttatctgggattaatgccatggaatgaaatttctgggctgtaggttagttgtatgtttagttttttacaatgcaccaaacttttacagagtacctttaccatctcatgtttccaccaacaatgtgtaagtgatctcatttctctgcattcttgccagtgtttgatgttgtcactattttttaacttagccattctaatatgcacagagttatatcgtattgaggttttaattcgaatttccctaagagccaatgatgctgaacatcttttcacaagcttatccgccatctatgtgttgtctttggtgaaatgtctccatgtcttttgcccatttttctaatggatttttttgtgtctattttgtttttacttttgggttacatgaattcttcatttagtctagatactagtgcatggtcagatatatggtttgcaggtatttttctcgatgtgcagcctgtctcttcatcctcttggcagcatctttctcagagcaaaattttaaaattttgtatgtcaaatttatcaaattgtgtcttttaaggcacacgattttaacgtcaaatctaagaactcctcctagcctttcatcctgaagactctcctgtatgtttttgtaaaatatttattattttgtgtttcacatttaaattcatcatctatttgcattttattttgcataaggtgtaaagttatgtcaaggttctttttcttcttttttctttccattatttttgtccacttgttctaagacccatgtgttgaaaagactatctttgctccactgaattattttgcactgtgtcaaaatcagttgagcaatttgtgtgggtctatttctgaagtctctattctgttccattaatctgcgtgtctatcccaacaccaacaccacactatcttgattactgtagctatttaataagtcttcagtctggtagacttattcctcttacttcattcttccttttcaacattgttttagctattctaaatccattgccttttcacataaattttagagtgccttttcacataaatttttcctacacctaaattccaaaaatattgctgagattttgataaaaattgtgtaaactgtgtaacagtttgggtaaaattgacattactgtgttgaatctctcaatccacgagcacaatatatttcttcattaatttagatgttctatgatttacttctaaaacttttttttgctttcaccatgtaagtacatggcttgttagatttatatttaatttttgtgacatagtaaaatatactatattttaaatttccatgtccatatgttcattattaattcacagaatgcaagtgattgttaatagactttatttttggagaacctttaggttcacagcaaaattgaaagacagagatttcccatctacccattgtgcccgcacgagcatggcctctgtcattattaataactctcaccagagtggtacattcgttacaataaatgaacctacgtcaacacatcattataactcagatccataggttccattagagtttactcttgttgttgtgttttctgtgtgtttggacaaatttatagtgatgtgtatctactatgataatatcatacagagtagtttcactgacctaaaatatttgtgctctgcctagtcatgcctccctgccaactaacccctggcaaccactgatatttttactatcttcataattttacctttcctggatgtcatatagttggaatcctacagtatatagaagcattttcagattggcttccttcagttagaaacaggcatttaagtttccttagtgtattttcatgtcttgatagctcatttctttttagcatctatagtctgaatgtaccagtttatttatccattcacctactgaagaacatcttgttgtttccaagttcaggcaattatgaataaagctgctataaacatccatctgcaggtttttgtgcggacataagttttcagcttatttgggtaaataccaaagagtctaattacttgatcatatagcaagagtatgtttagttttgtaaaaaatccttaaactgattttcagtggttgtacaagtttacattctcacaagcaatgaacaagagttcctattactccatatcctcaccagcattgggtggtgtcactgttctgagtgttgaccattctaagaggtatgtagtagcatcacattgttgttttaatttgcaatttcctgatgacatatgatgtgaagcgtcttttcatacgcctgttttccatctgtatatcttctttggtgagttatctgttaaggtgttttgcccatttttaaaatagagttgtttgttttcttattgttgatttttaacagttctttgtatattttggataacagtccattacctgatatgtcttttgcaaatattctctcctattctgtggcttgtctttacattcttttgacaatgtcttttgcagcatagaatttttcaatattaatgaagtcctgcttatcaattatttcttgcataggtcatgtctttggtgttatatctaaaaagtcatcaccagacccatatagattttctcctatgttatcttctgtgggctttatagttttgcattttacatttaagtttctgatccattttgagttaatgtttgtgaaaggtgtttgcatgtggatgcccagttgttccagcaccatttattgaaaaggttgtctttgctccgttatcaaacatcagtcagttgactatatttatgtgggtttattcctgggctctctattctgttccattgatctcttcttttgccaataagacactgtcttgattaccgaagtcttgaagtagagcagtctcaatcttctgactttgtgcttgtccttcaatattgtttttgtttgtttgtttgtttgtttgagatggagtctccctctctctgtcacccaggctggagtgcaatggcatgatctcggctcactgcaatctccgcctcctgggttcaagcgattctttcatttcagcctctcaagtagctgggattacaggcgtgtgccaccactcccagctaatttttgttgtttttagtacagacggggcttcatgatgttggccaggctggtctcatactcctgacctcaagtgatctgcccaccttggcctcccaaagtgctgggattacaggtgtgagccaccacgcccagcccttcaatgttgttttggctattcaaggtttcttgcctttccatatcatttttagaatctctttgttaatatctgcaaagtaactactgagattttgattgggattacattgagtctatagatcaatttgagaataactgacataataaaaatattgagccttcccatccatgaatatggattatcttctatgatttctttcatcagagggttgcagttttcctcatatagatatggtatgtattttgctagttttagatctaagaatttcatttgtgggaggtgctaatgtaaatggttacaatcaatttttgtatatttatcttgcatcctgctaccttgatgaattcacttatcaataatttctaggagattatttatagatagcttgaaaattttattttcatgccatctacatataagggacaattttatgtcttcctttcccatctgtatggattgatttaattgtcttgcctcattgcactggctagaacttgtagcagtacgtgaataagagtggtgagcgtgtgcattcacgccttgttcacaatattaaggggaaagcatttaatacttcactattaagtatgaagttagctgtaggtttatgtagatgttgtttattaagttgaggaaattctcctttagtcctatttttcagacaggttgtttcaagattagatatatcagtttgtcaaatgcttttagtacatttactgataacatcgtgtgatttttcctctatgacctgttaatatggtagattgtagtgactaattttcaaatatcaagccagatttacatcctggaaataaaccccaagtgatccattagtacattgctgaattttatgtgctgaaattgtattaataaattttccattaatatttgtaaggaatatggatttatagttttcttcttttgtactgtttttctggtttgggtatcaggctattgctggactcaacacatatactcagaattgttttcttcccttccatgttctggaaaagaatgtgtagaattggtgttaattcttcacaagattggcatacttttccaatgcagttatagaagtttgcttttgtagaagtttttaaattatgagttatatttccttaacagttatactcattatctagtatatccaaattactattaaatagccaaagtctaggccattcaaattatccattttatattcattgatttacagtagtttgtgccttttgaagaatcaatctatttcatctaaattattaaatacttatgtgaagaattgttcatagtaaacccttactgtctttttttttctttgtattttccaggcctgtagtaatattccctacttcatttctgatacgggtaacttgtgtcctctcaattttttctttgtcacttttagcacattgtcaattttattgaccgttttgaaaaaatagctctttgttaatgaatcttctttactgtttttctgtttttattttgattagtttttactctttattattttcttcttgagatgagaactttgattattgatctgagacttttcatcttgtctagtgtatgcgtttgggagcagctttttaaaacgcaatgcttaatttaacctaaatgacaatattttatagtaggcagtgcatacggtgttatctttaaaacctggtcttgctattaggtacctctctgagacgaaagtcttcaagcttattgaagtttatcaattagcaggtcgattaaaatgtcaacttttcttttaatatacccaaggtataatctatttgagggcagggacctgaagttgttagctcatatctttaatgcagaaaatctggccctaataaatgtttcataaataaatacacatttattccacggcccagttccattgttttaaatgagaatttgtcactatggtcatcccatagtaccaaggttcataatttcttttagcatacactctcaaagagatttggtttgctactctcaaacattcaaagtttattttaaattttatgatgatctggatcataaatttctttatttccctctcttgcctgtttccttttttccaactgatatcactaaactcctattacacccaatgtgcttttgagagctaaagttatcaacataatataaatagcaattaattcttaatatcaagaagtttacagctgagtagtaaagatgcattcatattgttagacccatctatgagtgggagtgaggagaagctaaaaaaaataatcttcataaagtaaatttaaacaaagcccagaagaatgagggagcatataatacacaaaggatataatacaaagaaattgcaagtggagacaattttattcacacaacaaaatgacaagcaatagtgataaagcaactaaaaaggaagacacaactgttttgatggagcttgccttccatcaggtaagaaacaccttaaacatacacccaatttatttatcacacatgcaaaaagggagtaaagctgcatgctcagaaaacatgtatgatgaattttttaaataatctgagatataatagtaggaaagcacataacataactcaaggaagttcagagatgtagggttgaaaatgaaggcaaaggctacattgcgtaggatctattcatccttgatcatattttctacaaggtatcacactagtactgagtatccatccaagactgaaatggtaggggtgagcctgcttgctaaaaattcttcagttgtattagtggcagtggctccactcctcgctaccacacccattttgcaattctctgccctgttttttgccctggaaagcttgtctcttcatttgtatcaccaacgcctcttgtgcactaacttttaggaaattatgtgacaccagctggacatcagagggcaagggaaaaaaaggtttggatatttgtgttccacttcacatatgcctcactaaggtcctggtagtgactgcccttttctattgctattccaacattattcctttaccttgacatattaggcctggaggtagaaacaaattacctctcttgctgcttgctaggtgactcaccatcccttatttgttctcatcagcctgcctatatgtttgtccatagttctttcaccgaattattatctgttaaatgcttttgaatctgctacctatatttcctaccaggatcttcactaataccccataagagatacaactattaaaacatgttactgattctcagctcactagcatcaatgcatttactatctttgtactcataatacctttcttacattcagaaatctttaaaaatcttcattaatccctgtacatttacctcataaaacagttgggaatcaatccacaaagtgaggagtcattattttcacaacacaggcaaattagttttgagttttgcttatatttggtaagcaaatgttttctttcttgactctatagatagtactgatatgtagtaccaagtcctgaaatcacatcgttatgtgaatgccatgggcttcattgtctatggaaatgtgagttaaagctctttttttttttttgtccagtggaaaaaaaaatctgaacatttaaaaatgaactcacaaggttccagatatctacttactaattttaaagggaattaagatggtgtcaagtaaaatttatttacagaacacacacacacacacacacacacacacacacacacacacacacacacaataatctctaaagtatcaaccatagatggagtggggaaccaggaccttcactcccacctggcaataaggcagcacacttctacctctatcttccaccagaacagtcagaaggggacgagctaaaatagatttaaataagatccagagtctgataatgtaatatcccaaatgccaaaaaagaaaatctcaactggaatgcaaaaagatagtagtcacttatactgacatgacaaagatgacagaattatctagcaaggatattaaagtagccatcccgaaaattgttgagtaagctttttaaaacattttgcaacaaataaaaaatgggaaaagtcagaaagaaatagaagacatagaacgacatgacattttagaactaaaaatatcgtaatcaaaaaaaagttcaataaatggtctcaacagtagaatggaggtgaggagacaggggaaatctgtgtgcagaaagataggacaatagaaattacacagtcgtaacaagaaggaaaaaaacgatttttaaaatgaaaatattctcagttgtcctatgggattataataaaagatctacggtttatgccatcagagtttcaaaaagggagggtgttgttgaacaagtactcaagcacataatgattgaaaaataccaaattttgtaaaatgcaaaaccctacagattcaaggagctgagtatacaggataaacccaaagaaactcatgcttagacgcatcatagtcaaatgtctgaaaactagttatattttttttttaaaaaaagtcttaaaaacagtgaaagagaaaaagacactttatctataggcaaaaaagttcaaatggcagaggatttcttatgtgaaaccatgaaagcccgaaggaagaagtatgacatttttcaagtgatgaaaggagagaactgtcaacttccagaaaatagaagaggaggcaacacttccaaatgtactttatgaggaagaagtattttgataataaaaccaggtaagcacagtagaagagtcaacaaattacagaccaataaaactcatggatatagagacaaaaagccttaacaaatttttacacattatattaagaagctaaagaagaataatcacttgatcatatcaattgatggaggggaaaaaacgtttgacaaaattcagtgccccatttatgataaaagctctcagaaaactaacaatggaggagaacgtcctcaacttggaaaagaataactacagaaatcttatagctaacattgtaataataatgaaagaatttacacctttcttcctaatattaggattaaggcaaagacggttgctttcagccctactattattcatagtactggaagttctagctagtgtaaaaatgcaagaaaagtggataaaagcgtacaaatcaggaaggaaaagttatactgtctccatttgcagatgttatgatgatctatgtaaaatcccaggtattctacaaagttactcttagaaatgatgagtttgttaaggtcttaggatacaagatcaacttataaaagtcaattgctaatcaatgaatatgaagtttcatttatataagatgaataagttctagagatctgctgtacaacatcgtatctatatgtaacaatacagcattataatttaagaatctgttcgttgggtagatctcatattaaatcttatcacagtaaaatgattattaaaaattaattgtatttttgtatacaagcaattaactactgaaacccaaaatttttcacatagtatcttgcagtcactctgaaacaatgaaatacttatgaatctaataaaacatttaccagatctatatactacaaactaaaaagctaaggaaataatgcaaagacttaaataaacggagatatatactgtattaatggaattggaggatacaacatagtaaatatatcaattcttccaaaactaatctatagtttgaatgcaattcctatcaaaacatcagtgaaacatttttgtctatttggacaccctccaaattgcttgaattctatttgtcttattttttctggtcctagtgcctataaactcactcacaaactagcatattttcccattggacttaactaaagagattttttaaacacctaagaaatatatgccttataatatgggtaacatttcaaccaatatggatcactgtggaaaaaggaagtagaaatgatccataatgattttttccctaatcaataaatttgtgaattttatataagtatattacctaataagcctgtttctcttcaacttatttgtcctgtgaagctgcattaatcataatgcttggaattatattaaataatcaaacaagttgggaaaatgaccctgcacttccaaagtaatataaaataatgcctttagggtttccaattatttaagaattaactccttgttcactttacgtttaccatattcagttctttctaattaatatgccatctatttaataacacaaggatgactggttaatattggaatataatcatgggccagtcttcattttacaacatgtatcatctaagtgtagacaaaaaaaagtaatttaaaaaaatgtgtatgagttcactgtaataaaaattatgctttatatttttgaaaaatgtatgtctaattaattcatctgtaaacaattgtaatttcattaaaattttaacaaaataatttcaactttcattttgaatcgggggtacatgttcaggagtttgttacaagggcatattgtgtgatgtggaggtttggggtactgatgatccagtcacccaggtagtgagcattgtacccagtaggtagtttttcagctcacacccgcttccctccattccccctctagtagtccccagtatctcttgttcccatctttatgtccactgtgtactcagtgttttgctcccatttataagtgagaacatgcggtatttggttttctgttcctgtgttaatttgcataggataatggcctccagctgcattcatcttgctgcaaagtacatgatttcattctttttcatgaccatgcagctaaccaaggaggtgaaagaactatacaaggagaactacaaaacactgctgaaagaaatcagagacaacacaaataaatgcaaaacatttcatgctcttggattggaagaataaatattgttaaaatggccatactgcccaaagcaatttacagattcagtgctaatcttatcaaactaccaacgtcaattttcatttttcattttcattagaaaagactaatccaaatttgtatggaaccaaaagagcccatagagccaaagcaatcttaagctaaaagaataaagcaagaggcatcacactacctgacttcaagctatactataagcctacagtaacccaaacagcatggtactggtacaaaaacagaccatagaccaatggaacagaatagtgaacccagaaacaaagcgacacacctataaccatctgatctttgactaagtcaacaaaaataagcaatggggaaaggacttcctattcaatagatggtgctgggaaaactggctggccacatgcagaagattgaaattggacctctacttttcattatatacaaaaatcaactgacggtgaactaaaggtttaaatataagacctcatactgtaaaaaatcctagaagaaaacctaggaagtacccttttttacattggtcttggcaaagaatttatgactaagtccccaaaagccattgcaacaaaaacaaaaattgacaagtggaacttgactaagccaaagagcttctgcaaagcaaaagaaacatcaacaaagtaaacagacgaagaatgggagaaaatattcacaaaatatgcatctgacaaaggcctagtatccagaatctataagaaacttaaatcaacaaaccaaatacaaatacattcattaaaaatgggcaaagtatatgaacagacacttttttttttttttttgagatagggtcttgctcttagtccaggctgaagtgcagtggcacagtctcggctcactgcaaacttcacctcccctgctcaagcgattctccagcctcagcctcctgagtggctgtgatgacaggcgcctgacatcacggctgtattttttttagagatggggtttcaccatgtcgccctggctggtcttgaactcctgagctcaaagcgatctgcctgcctcaacttctcaaagtaatagaattacaggcatgagctaacacacccggcctgaacagacacttcttgaaagaagacatacaagcggccaacaagcatataacattttttaacaacgtaaacatttttaaatgtgcttctttttacaaactggccgagtgtggtggctcatgcctataatcccagctcctggggaggctgaggcaggaggattacttgaggccagaagttaaagaccagcctgcgcaacataacaagaccctgtctctaaaaaaaatattaaattagctgaatatggtggcattcacctgtagacccagctactcagaagattgaggcaggaggatcacttgagcccaggagtttgagactataacgaggtatgattgtgtcgctacactccagcctggatgacagagcaagcctccatctcttaaatgaaaatttcttaaaaagcaaaaacaaacaggaaaagaacgggttttggaaactctgctgttttcctttttttgtgcaatcacatgcataaccgacagtagtgccattatattagaaatattaatatatctaatcacaacacaaagcactgtgtaaaaaagccgagtatgatgaaataaattaaagataacctaaatattggacatatgtactatgttaatgaattggaggaatcaatgcggtaaaaacatcaattcttccaaaatgtattcataattttaatgcaattcctatcaaaattctacctgaaagatattctgtagatagatctgtagatctatttgtagataaacttattctaaaatttatatggtaaattataaccacactctgggacatgaatctagaggaatgaaaaatgaaaaactacatgattgttttgcagctttatttgtagtgaccaaaccctggaaacaacgaaaatatcccacagtatgtgaataaagtaactatagaacatccatgccatgaactactactcagcaataaaaggaaataagctattgatgacaacttaaatggatctcaagtacagaatgccaaaaaaaaaaaaaaagccaatctcaaaaggttacataccgaatcattgcatttatctaatattcttaaaatgacaaaattacagtgatggagaacaaattgattggtaccaggctttagggatatttagggagggtgactgttgtgactgtaaaggggtagcatgaggcaaatctctgtggtgatgaaacaggtgtttatttgtggaggttgaggttacacaaatcagtgatgaaatagaaatatgtatacatatcaatgtcagtttcctggttttgatactgaattgtagttattgtaggatactgaattgtagttattgtagttaatctttgggagaaactgggtgaagggtacatgggatctctgtatactatccccgcaaattcctgtgaatctataagtatttgaaaataacaagttaaaataaatttttaaaaattctgtgacagttattaaaaatggaaatttgagcaagttcctttattatggggctaataagacctacaagatgtagttattctgaggactaaaggagaaagataagtgattaagggacacaagaaagtactgtggtgacacagtctgaactggagttcaatttgttcggtctaaattttattttacgtgcctttcacttttccagttattgtaagcatatatttgcacctggattataaaatcttaagggaagtatatgcattccacacaatgcagaaatcattataggtgccaaataaattctgattatcaactaaggctgaatggcaattaaatgtatctcagggcattcagatctatcaggatttggtgctttagacattacccaggacacatctttgttacatttagaaccacggttgtttttagaaacatacactttagggtttctcaaagttgaccatgcattagaatcaccggtaaaacacagagtgctgtgtcccaaccccagaatttctgacttttgaggtctcgtgtcaacttgcatttctcagaagttcccacgtgatattgatgttggtttgggaccgacaagttgtattcacgccttggcctaaacaagggtttatgtttgtagaaaactcacagtgcaagatacaaagggcacttatactctgggcaatattgtacctcacagcatagagggacactgatgctaacatgcagacttagagccaaatcagccccaaaacaattttttcattttttctatgttgttttatgaaaattttgcttatatgcatatttagacaaccacactgagaggaaaggaggtgacctagggaaaagaatgttttaaattaaaattaggccttatgttttatctcatacaccttttgctggggaaaatagcaatgttatgacaataatattctaaaacacaaaatgtacaattaactattaaggtaaacatcacagtctgactcaatatttttttaatttttatctattactcattgcagtcgcaagcagttgaatgtttgacatagaaaaatgagtctgtcactttaacaaatggtacaataaaaacactcaaacaaaaattttagtagggattattataactataaaaagaatatctttctttaaaaaatgtttccaatgttttctatcaattttgggctcgcctgttgcataaaagtaataaggaacaagatgaagaagctttctattggcaaagaatgatttacatgctgaatgacataatacaactgtattcacttaatacagaaaacaagcctctattcagaaccattaaatgatcattaactcaatgtctaaaaaaatggtgttttaagaattggcaccagagaaatggaagaaagaataatttgttagtaaagaagttttagcataattcacaactgaaatttaggatttgagaaaaatttctttcctgcattataagagtattctttattttagcaggaaaacatgtcccatgagacctatacacacacacattctgccttcagaattcagctgctgcattctgctgctgcttctcttattcagactgttggcatcatcaatacataacttttgattgaatcccaaggggaaaaaataactttggtagacagtggatacataacaaatgcatggattattctgggcattcctttttatttggtagagtgaaatttttggtgttgttgagaggataaaaaaggcatttaaaagtcaattttgaatccggattttctgctctgttaataaattcacatgaaagttacagaaagtattgttatgcttttgtactgaatagtttttgtgtttagaaggctttaaaagcaagtactatgtccactgtgctattctggtttggatattaatcagaacacagttgagcattgtttgaattcacagagcttgccatgctggaagcacaaccttatatgtagtgaccatggacagtcctattatgggaaaccaacttgagagagaaggcgggtcacttgcttgtgcgcaggtcctggaatttgaaatatccgggggcctctacagaatcctggcatcagttactgtgttgactcactcagtgttgggatcactcactttccccctacaggactcagatctgggaggcaattaccttcggagaaaaacgaataggaaaaactgaagtgttactttttttaaagctgctgaagtttgttggtttctcattgtttttaagcctactggagcaataaagtttgaagaacttttaccaggttttttttatcgctgccttgatatacacttttcaaaatgctttggtgggaagaagtagaggactgttgtaagtacaaagtaactaaaaatatattttactgtggcataacgtttagtttgtgacaagctcactaattaggtagattgattttaaattatcacagtagtttgcaaagaagcataaatgttatatatactgcatatatatatgtatttattcaggaatatatatttttcattgggaaaacttttcaacagaaatggagtgtaaaagtttttctttgcgatagaactaaacacatgatttcttgattaacaaaccactgcagtaatagaatatgcagaatgtcatttgactataacagatttattttgattgctgtgagatagtttgtatatctgagttattattttgattagttgatacttccgtatttagtaacagttacataaaggttactgacctgacatatattctcaattgaactaactactgtataggaactacatggaggcctaaaagttagaaaaagtttctctgacacatcatggataaaataaagaataaaatgagttgggacggataattgaaggatgtgaaaagtattgataaagatttaattttaatgtttcttactcacatttactatttcaaatgctcttttctgtagcatatcatgataattatttcaaataatgatgtgatctatgctatcaaatgatcagatgatttcttgggtaaacgacatacaaacttgaggaactcctaattatatttagtagtaaagtcaccttgttgtttcatgtctattatgagccagcttttcagttcaattttttagtttgtctttcatatagaaatacaactatttcgtttatttttaagaaagtcatgatgactaatgaaggatttaaaaatggactgtggcacaacagtaaaaataatatatgataaggactgtgtgtcccgaagagatgggagtttatctcttccccacccatctttgacttgtggagtgtagttattctaaaatagatatgagggcaatgcctataattaagaatgaaaaaataaatctctccaaataagtaatgctccacaactactaaaaaaaaaggcagaagttttgccactgggaaaactttgtggaaataagttaacattgtccatgtattgagtcacattaaaagctaccagactttataatacaatatttacttacattgttggcttgcttcataaatttcttttggtggacatcattattacttttagattgaaaaactattatatttactatcattacaaatatatgcatggcatatatctgttgtttgcaatatacacacacatttttattttttgtttttatttctttgatatatgtaacataaataccatcaaaatcactagtgattttatatatatatatattctacataattaacatcatatacaagtatatagagcaattttgaaagaatatatgcaattctgctgaaattaagcaaggtaaatctacactctgctttgtcatagatattcaaataactttcaattcttagaatgcgaagaaaggtaatctttttgggacatgccctgtaggattttttcacgctgcatttaaaaaatcatcaagtaatgcctatgcaacatgacaatgagtttggtaagaaaaaacggagatatactcagggctatattatacattaaattttgctgtttgacaacatactgctacttggatgtttgacatttgaatccagtttgtaaatttgccgtagtttgataaacttacaaaagtacgttttgttgttttttaaccaaaacagttaccctttaaaagagatcactgtattgtcaaacatattgtattgttcacttttagaattactcaaataatgcattgtaaagaattattcaaatagtgtactgcaaatagacatttcatttgaatatatttaaatgatgtaagtcatctgaggtctaataaaatcaccttttagaatttcatctgcagaatcttttaaagacatcttaactacgaaaaagagattgctgatctaaattgatgatatactgttaatacaaagcttttggtgtatcttacatgacataacattatgaaaaatacaatagagtatgtcatatagatgttactctaaactttaaaaaaagactacaaagtgttctatgcataattacattatttaaggggaaaaaggtgttggctgacactattccagctagacagtactgaattgcaaattcatcatttgggcacagatattaatacagcttcctctttattcctatagcattcatttgaaatccctgtactccatgtcatttgctacatatgaaacaaattgtcaagtttttaaccacttgtgtagtttaataaaagagattaaaatcattgtcttggaaacatcaggtgtttttcaaaattctattttattatctttcatcaaaattttatctcaagagtaaaacaaagtcatttcccaaactttccttctccttccaccttctattgtaatattttcctaacttattaaaaatgatttatcatactttttcatcaactctttatttcatcacacatacaagaaacacagtattttggtatgagtatatatatttatatatatgcacatttatatgcattcaaatcacagggtataaagtttcctaagagggtctaattagaaattaacctttctttaaagataattttctgttcatttttctaaattttctattttaaacacacatcattttttaaggaattgacaaatgagactaatgtacattccctgtctgacaacacagaacgaaccaggaagaaaggatttatggggcctgaggttatacaattgggggtgctattttaagaaaaataatagaaaattggatacagccttgggaggggcccctcatgtaagtaaggctttaatagtttcttgggaaatcacctctgtatgaagagatgtgttgacatttaatcttttcccagttacattttaaaataaaattgatgctagttatatttctttagagcatttattatttctcaaagacaaccttttatttaatgcagattagagagttaaaagaatttataatggtaggaatttgacatttctgcctttcattctgaaaagatacattgattaaagtgatgtcaaactcagttaatggaggcggtgcagttatttgaaatatacagggtatataatttgaaggcacgccaaatcacaatgacaaggaataatgatgaccttggtttatttttatacagtacattcaggttttgattggattcagagagaggcaatggttttctttctcacaaagtcctgctatagtcctaggaggtttgtgttctgttatcaaggcagttggttcgtattggaatattttctggggaaggtcatgggctgcagtgtgggaaataaacgtttttattaaatgcaaccaggtttcatgaaaatatttccccttgtagagtgtgctcaatgcagtatactgatcttcaaaaaacaaacaaaccaagcaaataaatagtttgtagtcttcaccttttccctacgtaaaacatctattagttagacttccttggggtttcatgctataaaatattgacatatgtttggagttctgaagtttcattttaatacagatatcaaagttaaaatggcaacaccatgggataatttattattttaccaagtttggagggttttttctatttatgtcacttatagaattgtccctaaaatccttgcaaaatttcaagctccctctacttaatactaaaagtgaatgtgtcttccagagattctgataaccccttcgaatgggagagtaactctgctatttgtgaatcactcctatactaaatatagttccaagattaaaagctaaaatgattttgtttattttttcatgaaattttttcatgaaaggcttgatagtataaaaagtctgtttccctcatatattacagcatattatagcattcaatgtgccttcttaaaccagatggctcctctagagattatgaaatactttaacacccagggcatagcctttctgtttccccattcaagattacttccttgaatatggcccaacaaaaagaccaaaaaaatacatttggctccagcgttttaagggcatataaattttcttaagcacaattctgataggcagcagacaaatgagaatgaggaagggaaatggctctgctgtcttatgcttaaaagtgtcctcatatagagagaaacaacacaccctggggcctttcggagggtagagggttggaggaggaagaggatcaggaaaagcaactaatgggtactaggcttgatacctgggtgatgaaataatctgtacagcaaacccctatggcacaagtttacctatgtaacaaacctgcacttgtagccctgaacttaaaagttaaaaaaaaataaaataaaaagagtcctcatctcacggccatacaacctctacctcattcccattaaaaacacaaagatcagtactccctcttttatagctcacatcttctgtttaggctgccattttaagggataatttctattcaactctgagctcgatctttattttaatctgatatcactcgttcaaaatacttgggaatttcagtaggcaacggaacacacagagcaattttctggaggcctacaacctctgaaggtgactttgcgtagtatatgtaatgatagtaagccctgagaaaaccaatgttcttagtagtctggatttggtttagaaatcaatgtattcctgctttcttttgtgatcttttgccttctccctcaatgcctcactttcactctgtcattatgaaccccattcctcactaatgggaactgggggagaatggacaatgatcctttaattgaaatggagttgtcatttccttgccatgctgataaaatgttgttgctgttgttgtttgttgttgttcttaaatgactctttcagaatttttaactcagtattttgattacataccattttaagaaaataattgtccataaattaaaaatgctagcaaattgatgaattgattttctcatgccaatttggaaatctgaaatatatctaagactggtgaataatatgtaggtctaattgccatttgaataaaagaatctgaggaagagctttgcctttatttttgtttattattcattttagtttagttatttattttagtagaaaaatgtggttgtgtcaacgaagaggaggtacattaaaatgcattattaaagccaatgcttatccatgtaatgaaatgagaatgtagatggcttaatgggttttggagaggattaagataattttaaagaaacttcaaaaaatcagatgctcgaatcatgatgttttttgtttatatttaataaatatgaaaaccatacatgggcatatcaacaatgaggaattcacatatatatcacgaagtctcttgctaatttgtcaacttttaaatgtgttgtcttcactatcatgaaaattttgatttttaaaaaaggtcagtgttagctgagcacaattaccattacggtgtcccatattatttccaattatgggcaaataaaatgcttaccctttaaatgtttttaccctcttcttggcttttgttttgttttgttttaaagcgttctcccttcttccactctgcttttggctaagactgtcatggaatcaggactataaaagggcataaacatcagtagcttttttctcattcctggcactcatctttatttgcactcaacttgtctcttcctttatcagattacggttgcaatagtaccttagcctgagctaagtgctgacttaaagggcaagggagtcagtacactgttacaagtgcagattttagccttggaagctgtgtgaggaaaaattaaagaaataagaaagaaaaatcacaaaatcagaatggcccacgtattttcatcaaaggcaaattgagtaattcctttttatgttggtgcttaagaacgatgtattagaaataaattggtgactaagtgaacaaaatattaataaactagttgagtaagtgaaaaaataataatctgtaaaaatgatgaatcccaatgactcacatgttgcaaaataactaggaagcaaaagggaaattagactttaaagagcgtaatcagatgcaagaaatgttggcttgtaggtggttaactaaaatcgcttacgggaagctcagacagctggggaatcctgatttagtagacgctgaagggcagggcatgagccatgtgaacagctgctgaagagctagaggattcctttggattaggtgtacacaccccgtctctaatgggctgtcagagagcaccaagtgttatcacagaggttcactttgctcaagcctatggcttttgcagtgttttactttaaatgtctgaaaatggattggctctcaaaataaatccaaaaataaaagtatcaaaataagtgactctctaaaacttgtattgtgtggttttgggtgaccacagtttaaagaagggacttacagctgatgatttgttatccatttattgattcatttgtccatgtaacaaatacacatattgagtgcccattttgtgccaggtactgtgctatgctctggcgatagtattctaaacaagtgaactcaaagagagactagcatttcaaggaggatgtgcatattaaatacacacacacgcaaactacttgcattggagataagggctatagaataaagcacacattgtaataagaatgtataatagggagagttagaccagtcttcgaaattggggaaatacttctgagaaaaaaaaaatattcaaagcaaggcaaagaagaatgaggttagagtatagttgtccaaaagaaaagagggagcaaaaatgtccctgtcagagggagcaatgtttctgaatgtggaaaatggtatggagaaagatctaaaacaagtacagctttcctagagtacagtgagggcagaaaagtgtggaacaagcttgcatctgaatggccgactggggtccaatcattcagagccttgaaggttatagaaattatttttctctttatactaagatcaatggacagccttatgggtttcaggtagaaaactgatgtaaacatatttgtattttttaagactatcactctgttttgtgtgaaagagattggcaagtgcctagggtagatgaaggactatcaatctgaagcaattacggtagctcatccaaaagaaggtgatttggactagaatggggacagtggagatgaaagaagtaaatctattcaagatttgtatatgagatagaatcaataggaattggtgttgtattgcatgctgtgtgctccatgaaatgcacacctgggtggataatggtgccatttgcaaggagattggaagggaaattggaacaacaggaaggattaggggtgtggatgctaaggtgtttgttttgttttgtatttttatgtagcgcgtgggtattgtgcctagaaatgaagtcattattagggatttaaatatgcaactcatggagtggatgagaccagctagaaagataatagagtgtgaagaggagatcggaaattcaataaagaagacaaaagcactaaaaaaaaaaaatcagagaagacacatctagaaaaaatgatgaaattctaaggaaaataatatttccataaagaggtctgttcctttcgatctccaatttaatgacttcatgaatgaggatcccacttttagcattaggtgtcttggtttccacagtctctaccatctatttacccctaatttcctcccatattgctatttctgtgaatattaccaaaatgttgccttagtagaaaagcttcaataaatatttaaattgtataacgtattcagctttttcctgtactctgcacttcctaaaaataccttcttcggaaaccccatttcaactgactactgtataatgaaatgagccttcagtgtaaaacatttatcatagtctcaatttcaattgctcagtcagaattgttgagtaatatgaaaaatcatcctttagagaatacagaattgcatagttatgacaaggtaagtttgcactttatttaatgctagtttagttaatatagatgcttattggagaaatgtctaaaaattctggaggaccgttagtgaaagtgattatcccaatatctgcaaaaatggtaaaaatacctagaaaacattgacatttcagtttaaataaagccagaatcacaataaagagatagaaggcatttgagtaattcaatctaatcatggatgaatgtaatgtacttatcagttagctttggaggaagtaagactcgatagaatagtaatatgatattgagcaactttttttaacattaggtttttaattgcttataactcaacattgttgaacacctatgttctctttgctttttatgagacagcaactctaagtcagagaacagatacacacacatatgtatatgcgtacaactactataaaatatcaagaaagttataaagcatggtacaaatcaatcataaatgattacttatgaatagtgtgattatggacattctcattgaagaatccatttttataaataggcataagagtatggacatacagagatgtgaattagagaatgattgcaagaagcagtgaggcaaaaaggattaatgaaacattgatctgtcttacatacacagctattgacagtaccttgtgtgtgcatagcactattctagattcacctaatcttcaatgataatactgtatttaccatttaacaagcctgtaataagtgtcaggcacttctctgattacatcacatacatatgtgataagttccatattaactctagaaggtggggaaacataatcatctaaatttaccagatgaatatgtagaggtacagggagattaagtaatttgcttaaggtagctcagctggtacgtggtagagtcaggattttaatggtggcagcatgacagtaggattaaagattcttaaccagtcagttgtcacgatctctcagattttaatagaattctaaaaaggatagaacaaaatataaaatggcaggaatcatagtatcttctaacaagaactagacatgtcccattgaggatgctctttaaaaataaaacccattaaaattttgggttgtttactcaaagcctatagacattggcatattatattttcttagataaaaactgagatatcctaaataactcatgcccattctctagacttgcatagggagctgtctatgataatatccataacagttatcttgtttcacaattttattactatctcactcttcttactttgtgaagatgaaaaagatcaaaaataaaactaatgcagccctggtttgtttgtaatcatctacagttagccatccttagagtggtctcactagttgttcttttagagtttatttcagttatgtacaggcaactgtgctacatgaacaaaaagctaagaactgggctaacctgaacatgatttagtattgtaaaaaaatggtttacatagattaacgtgccatactattctgaatagtacttggcataaacagtaggttatttaagttactataattactgttgcctttttacataaactaatttttctcttatcttcattatgttagtcatccacagtgtgatatttagttgcatacattcatatagtgtacactgtacaattctagagtgtaccagtaacgtggactattaatattatgctatgaggtaaatgacacccctggagttaagcaatgtgcactctgtacgataacgtcaacattggcattctcatatatatgattagaaataatactgagtttctctgacttcacaagcaattttattctctcatctcataaagaggtaatgaatgcacacatatctacatatttaaaaataatgtcagagatcgtgatggaacagaattattcaagatgtataaatgagggtgggaggcaaagggaagtcagaaatactccccaataatttatttcaaattaaaagcctattggttattggctggtcgcggtggctcatgcctgtaatcccaacactttgggaggccaaggcgggcagatcacctgaggtcaggaattccagaccagcctggccaacatggtgaaaccacatctctactaaaatacaaaaattagccagacgtggtggcgtgcacctgtaatcccagctactcaggaggctgtggcaggagaatcacttgagcccgggaggtggaagttgcagtgagcggagatctcgccactgtactccagcctgggtgaaagagtgagactctgtctcaaaaaaaaaaaaaaaaaaaaaaaagtctattgattatcatgtgcgtttccatggtatcaattgtttagtattgtccagtaactaactagtatataaaactatcaggataatataaattttaacatttatttaaaatgcatcttcttaactgtaaggttattgatctttggataagctatagaaataagccttaattcagaaatatatttcggagacccagtaggttaatttgtagcactactctttaatattaaatatacaaatatacattgtttttataacttactgctataatgacactaagatgtgtgattatataaaaataagaaattgttagaatttattttattttaatcaatgctgatccatttttctagtgtatgagattagatgaggttgtatgagataccacttttctaggaaaaaagaaagtctttatgacagtgtgatgaatgaagtaaattagctcatttctttcaatattactagtgtgcatagatcttctctttttgtctttctgtctatcatacatacacagaggcacacatacatacacattacttggaaattaagtggtttacgtatgaaagtttttggctttactgataagatcagtaacatgataaataatacaacactgaatacatttttccatttgaaaagtgtaaagaacactacaacacggttgggaaaaaaaaacaacttattatattcaaatgtcattcccaattgtaacaaacatataattatttatttcttaattaagaagctattaataatagtactttaatattcaacattagcagtaactttgttggtttcttttttgataatttgtttaagaaaattagattataaattctgttatggtaaaaatacaaaaataaagcaaagtattatcttctttctatctcttatatgcatcagttggacaagatattgagattctcttttcttttaattgcatgctttcattatttttctattcaagcttcaccctgctaagttcaagtgaagtagaggacttcatgtctctagaaccaattaatgaaatttcttcgtctttcttgaacttgcagaaggtcaatagtgaccattttctcccttcttaaaaatgttgtcgtctttaagatctgtgcactgtcctctcatggcttcactactactttggagggtgtttgtattcagtctgcattgcaggctgatcctctcttctcagcctttaaaaattaggtttccttgggatctagtcctagcataattctcttctcataatgatctcttcctcgatcattgcacttatgtccacagctttattaacacttatatacagataactaaccaagttatacctctagcttagatttctccaatgaattccagaactgtgatttcaactgcctgggtggcatctccattcttatgtgatagtcacctccctctaaatgccctaaacagaactttctcttcaccgcacaaaacctgcttccttctcattgtttttcttatcattgaatggtgcaaccattcacccagtttcacaagccagaaacatatctcatccttgaaactctgatcttttttacccagttatttctaagtcattgccagtcactgtgggttttatcctctaatatattttcatccacttctctttatctcctctaccatcatcctagcgcaatatattttctctcactaggaatacagcagcctttcctttccagtttctctgcattctctttcgtattcttgataatccactctctaaacttcatgcagccaattaaattcgaagataccaccacttgttaaatcatgttagtagtttctcttggttgctaggaaagccaaacaaaacaaaacaaaacacatttaaaaatcaaagtctagacactgcctacctctcctatctcatttcccatcatgtttcctttgcctcgcccccttactggctttctttttgttccctgactaggtatagctttttttttttatctacagtacttttgtgtatgcttttctatttgtctagaacctccccgtttccccttttttaccttgatgacaccattttccacctacaagcttacctctggatagacatcaaaatcccctaagtacatcaaattcctctaccacgtaacatctgttcataacacatagcactgttatgattccatatgtatgtacgtgactaattaatacttgccagtcggattatgtggtaagttctatgaaccaagacacctcaactgttcttgctcaccactttattacctggaaccaaacacattaggtttccccatatatatttttaaataagttacttgatgtgtaatgctttaatgaacataattacagatgtttacatataatatgttataataatgatattttgattgcattttatgaaaattttatatgacaaagcactttcattttggttaaagcttcatatataaatatataataaagatttgctttttgtcattgggtgctgttcccttttttgatttcccatactgcttttcacttgtggttcttgattttgttttttactgtttttaacccatgtcctttttctttccttaatctatctttgtaaagtctcaaagaactagtatctagaatatataaatatcactcaaaactgagcactaaaaccacaaataatctagtggaaaaaaatgtgggaaaagccttaatagacatttcactgaagaggatatacagatggtaaagaaatgcataaaaagatgttcagcttcactagccattaaagaaatgcaaattaacactacaatgagttatcactatacacctatcagaatggctaaaattaaaaaaagaaaaacagtgacaacactgaaagctaacagggatgcaaaggaactgggtctttctaatattgctgatgggaatgtaaaatggtacaaccattctagaaaacagtttaggagtttcttctaaaattaaacatgcagtcaccatacagcccagcaattgtactcttgatatttatcccagaaaattgatgtttatgttcacccaaaaaccttgacatgaatgcagtagctagaaacaagaaacagctcaagtatccatcaatgagtgactgttaaacaaactgttatatactcataccactaaatactacacaacaatttaaaggaatgaactactgatactcaatattcacaactccaatggatgtcaagagcaccatattgagcaaaaaaaagtcaaaggttaaatactgtgttatttcttgtatataacattactgaaatataattatagatattaagaacagatattgatattaagaacagatattggttgccagaggtcaggaataaggcagagggtatgctatataatggtgccacaatggagccttgtggtgatggacctgctcaatattttgattgtggtgtttgttacacaaagctacacttgataatgtcgaatagagcttcacacacaaacacacacacacacacaccagagtcacacaagtgcatacttgtctatctggtaaagcccgaataagctctatgaattatagcaataatttcccagtttttatattgtactatagttatacatggtatcaacattgggagaggtaaagtgaagtttgcacaagacattgttgcatatttctttgcgacttcctgtgagtctataatgattgcaaaataaaaatttgaaaaatacagcattagacctttaataagctcttggttttctgaaggctagggtatcatcaccaaacctaatcgaggataagtcttgtaaattaataagtctatcactcaaggtacaaaggatggtttaatgctaatctgctagaatgcaatccatttctattatatgggaacgtgcatcactgattgaataaaatatcatgatgatggaggccgtattctatatgtcctactttgtaaggtgttgtgtttcaggttgtttatgaccaaaaaccctatatgacaagcgctagaagttatgctggtccacgggcatggtaacttgacaatgcctgagactacctgggttttaaacttgcctctacctacaaaggcaagtaatcctggacaagccaatatttatttaactagtattaattgagagcctaccatatttctggcactgagctgagcatgtctactactgtcctcaagaggaaattaggaaaaataatgccccttcacaagcttacttattgttggctttaaaagggggatatataaagtttcttggtgagggtcaaagtgttgagaataatttttctttgtattattttaactattattgttaatcacaaataactaatgtatataactctaaaagataaatgtacatttggataccaacttgtataaacagatacatagatcaaaagactacctctgattttatgtttgtgcgtgtgtgaatgatctccttgctttcaatctggtcttcagaaaatcccaccttgtaattgctgcccccgttgagtttctaaaacaaataagattgtgtgcctccagcttaacgtcctttagagaatcttctagcttcagggtaaaatccaaggtcctaacgtacaaggtctttcacagtatggcatctgctcatgtctctcacctcctgatctgctgttccccaccaggaacacttctgtctagatataaaattactttggttcagcaaataaaataactttggttcatgtaattttgtgtctatgacttgttcccacttcttggaatgttctcccaaaaaccactatcaccatgtctcttccaccaatgactattaatattatttttatctttccttatagaatattgtttaaaagaattccttactaccctaggtcagaaaatggggccccaatatgtattcttattgtaaactcactatggataattctagacaagcaattatatcccctattttagctgtcagtttgcttctcggcttctgactcactctcttgctccttgaggagatagcctgtgcttattatatgtggattaattgtgcctaacagcttgtaggtacacaaatgaatgactacacagcatttatctgactattgtttagccattacatcactgtatacatatttgaaactcaggcatcattcagattggaaaagccttatgaatactggcatgcattattttgtacacacacacacacacacacacacacacacacacaaaatagaacaggatgggataatcctaagtagatacttttttgtccagtgtactcaatatattgtaaaaattataaatcttagactaaaatgttggttgcttaatttggatgattcatataatctgtcgtgtttttggttatctgtgtactttgttttctctttctttcttagtctcaaaggaaatgtccaagttaaaaaagagccccaatttgtggggattcctttgaggagttacaaagctgagatatcttaggagatgccaaattgatgcaaagtggtggagaggtgagcagagtagaaatttggagaatcacttctgctcctatagtgcatgcatgccagggctgctgtcctttgaggtgggcacaggagctctaagtccagtgggtgtctgaggacagattactgagaaagtgaatggttggcttggactacctcaaagacaagtgtttgctcctgcttgagctattgttggaggtttcctgaaggagacttagaacggaatgtccattccagagagtattcagtttcagtttgctgcattcctaagcttattttccaccctgggagctggccacaatgattggaaatctttcatctgttttaatctgggattgagctcatttataaaaggaaacttagtgtctggataaatatgtgtgcacaagcatggagccccatacaagtatgcccaaattcaaggtgagaaatgtttattgcatgactcaaatacatggaattgaatggactctgaaaacaaaaataggatctacagagccagtctaacaacctattcatatttattatttttgcacttaaatgtttgtaatattttattgaccagtgaatatgaactatattttgtatattacgttaacatattattcatgtaataatgaatttttaaaaactggtgtcttgaaccctttcaatttccaaagtattacagaaatccacagatctggtatgcacaggcattttatgagaaaacttagcttgagtgatatcattaatttactgaagtagtaggccctctgacctgcttttataataaaattaagtttctgtaaactaataagaccatagtaactttttctttaatattttatctttgaggagatttgttaaagaggcttgtatgtgacatgacaatctattttgacttataaaatttcaaccaaagaaaagatgcgatatagtatctttgttcttatctatgacaatttttatgatgatagttccataattaaattttttcttaatgaaagtgtatattattgtattatcttcaactaaattagatcatataacccaattttgatctccgtatgccaaaagcagagaattgaccagccagaaaaccatccaggccttatataatatattgtgcctagatgaaagcttataagcattcttctgcctggggctcacattgtagaaatgtggtgtgcaattttgaaagttgaaaatatagactctgattgagaaatggaaaagagtagagttctaattcatgacatctagaaatcaagttctaccactgaaaaattaatttgcatatattcattatcttttatagtgaatgataatgataataaagacaataaagataatatacatataattggttttataaaaactatggcaaaaaatatattaccattctcacttgtcagatgaggtaactgagtctatattatttgaaatataactttaaaaattatattatctccgctactagattatatactcctggatgccgcaaaccacatcttctatgtgtttatattctcatagagttttgaatatttccttgtactaggaagaagttttataaatgtgttttgaattaattaatatccaaaagtgatggaaagaattataagttacttataaatttcttttgtttcaaaccattagatgatgacacttaattttttgggtataatatgatatggaaagactctcagataacttcaaaaactagaattatgcatacatacactcagatttctaaaaataacatgctatcaattcatcctgcctgccaggtatacaattcatttgagttttgcatgcgcgtttcaattgttcacattaaactgtattcatagatacaaattcacttttggaatcttgggtacttaaacaaaaacatagcctttctaatagaagtataaaaaggatactaattgatgaatataccaagtatctttccaattgcaggaaaccattaaaattgtgtctatacactgtatctcttttatcaaagactgtaacaaaatcaattgctatacatattgaaatatttatgtatctggtatgattacattagcttcagagtggttccaaatttaaattcccattggagaaaaatggagtgagaaatttgtacataagagagaagaaatgttttcttttttttgagacagagtctcgctctgttgcccaggctggaatgcagttgtgtgatctcggctcactgcaaccttcacctcctgagttcaagcgattctcctgtctcagcctcctgagtaactgggattacaggcgggtcccaccatgcccgcctaatttttatatttttagtagagacggggttttgccatgttggccaggctggtcttgaacttctgacctcaggtgatctgcccacctcagcctcccaaagtgctgggtttataggtgtgagccaccacacccagccgagagaagaaattttacagttagaatttatttggacacattttagaaatttttttcctgtaaaactcaagtttcatagtgtgtacgtgaatgcatctgtgtgagtgaacacctgtgtatttgtgtgctataaaaagatgaacacaggaatctaatagcataagtcgcaaggtaagagtattgtccaactaaaatagctaacttcagaggtatgaattactttttgttggtgggtatgattttaacattcccttgaatttattattgtaatatttgccactaaaagaaaaaaatcatggcttagaaataaatttaaagtaaccaagatcattgctatataaaccagaatttaaattgagggtttttgaaccattagggtatatttcccctctggcttaaatttgaaaactgatgaaattttagatctcagcacatttaatatgtctaaacaatactcatttgactgcaaaacctgtatatgtaatttccaaggcccagaagttcagtatttgaaattaaattgttgcatattactgagaaatattatcttaaagcatctgctccttctgctgttctaagttaggtgtgtatttctcgttagtgctcagtcgatgagtacaaataggcatgcagcatgagagcagagcattcatttcattgactgcaattactaacatgatttttgacatcttattcattgggagagtgtcttttaatgttaatttgaatgaatgggaatactttcacattcttaatgaatctgctcatagagtaaaataaaacatgactgttatgctttgaagatcaagaatcttcttttacacaaaagggtaaaaaaggccaaagaaggtgaagtgacactcttcatgctagttccaacacgagtattttgatgaacaagaaaaaaagccttctttagatgtaggtgaactgggtgatttggcattccttcctctgaattcccagggtattttgcctgtttttctttaactgcatgcaattcttgtcctttatccactgtttacaggtctgtttctcacaataggcggtgagtttatttacacagtgactgctgttacatatcacatgtactaagtctctagtgattgttgcttaacgatgactgaattgataggtcctagcatggctgatctctcacattattcttgtttggtttgggtttgggtatgaatggtggaaagagaaatggctggctctgagcaacatattacaatgggtttctagcatctactcctcacctagtactagcttagacagtgagcaaaataaaaccataaagcaggccaggcatggtggctcatgcaagtaatcccaacactttgggaggccaaggcgggaagatcacttgaggccaggagttcgagaccagcctggccaacatggtgtaaccccgtctctactaaaaagacaaacattagctggacgtggtggtgcacacgtgtaatcccagctgcttgggaggctgaggcagaagaatccgttgaacccaggaggcagaggttgcagtgagccaagttcgtgccactgcactccagcctaggtgacagagcgagactctatctcaaaaaaaacgaaaaaaaagtaaaagtaaaaaagctaagaaagcaaactatgtgttgtcaagaagtgtttatttttgcatcttgaatttttaaaggaggaggttcagatctatttgttagatgacacagggtttgtgaaaactcttgcagaccaatgaaatcagaacatacaggcacaccaagtgcagattgtgtttagagccactgttctaaaagcaggtgtaagagggttgcagttatatcccagataagagccttagggcattaggaatgaaaaagacaaaatgcaaacaaaagatatttagatatttaattagtaaaacttatttgcgcgggtaatgaggagagagacaaaaatagtagagagcaaatcatcaatactgacttcctgatttcttactagggcagtataggtgtacactatatatatatatataatattatatattatatatatatatataatattatatattatatatatatataatattatatattatatatatatataatattatatatataatattatatattatataatatataatattatatattatatatatatatataatattatatattatatattagtactacttccttttataaattggacagaaagcttatatgtatagaaagaaagatcaggctgggcgcggtggctcacgcctgtaatcccagcactttgggaggccgaggcgggtggatcatgaggtcaggagatcgagaccatcctggctaacaaggtgaaaccccgtctctactaaaaatacaaaaaattagccgggcgcggtggcgggcgcctgtggtcccagctactcgggaggctgaggcaggagaatggcgtgaacccgggaagcggagcttgcagtgagccgagattgcgccactgcagtccgcagtccggcctgggcgacagagcgagactccgtctcaaaaaaaaaaaaaaaaaaaaaaagaaagaaagatcaatattttttcaaatgtccagccaattgtttaagtaagttaaggtatgtaatctaaacttataatttaagtttaaagaaaaacattagaccaaatatttagccattttgatgtagccaagtttatgcttcaggagagttgcatagttatgaattgagctcacagaaatacaaatacacacgtcatcatagtgtgatatccagcatagatggggggcagttatcataaatcctgtcctaggctgggtttggaatgtgagacagattttataataataatatttcatctacataaaacagtccatttcctggactataaggatcatgataccatttgtttatcatggctacaaacagaacaggaagtagtatccttcaacagagaagataaattataacagtcattatttagaatatttgcaattcctttgtgtagggctattctttgttagctgaaataaagctctctgccttgattacagttatcattttgtgaaaatattgaatgagtttagattcctaaaggaaattagaagttgagtaaaatgtacattcacttagaaatttccttgcagtgaaagatgctgattactataaatgaagacagggaaatttcattcatttaaagagattactacaggtgacaagtttaaaattagccttaacttaaaagttggaaaatattttttcctgctagagactaatgccaactccgtgatgtatgtaaggtcatgttatcaggacccagcttattgctgctacctcctctcctacccttctcctcatctcttactcctaaccctttagccaaaggctcctatgtgcgggcccccaaactaccatgctttcgtgttgtcagggataagtcttcctgaaattaccctccttctccttaccaatcacttaattaattaaagcctggtttccacttcatctcaggaaaaattatttcctaacccctctcaccaatctccattgactccgccaatggaggttaggtatggttttaaagtgttctcatagcataagttcatcaaaatgcacaatatctttcaccatattttgtcaatttatttactttaatatgagaatacaaatatcttggcatgtttatcagtgttacacggatactgttattttatcatcatgtttcccacctctcccccatacctagagatgagcataaggcttaatatataaagttatttggttaatgctttttttgaataaacaaatacatatctaagggcatgtgagcaacagagttcattgtaacactatgcttacagttaatcatctttttgttattgttctagcagcaagaaggatatatatctatatatatatacaaaggggagaatgagaatgatctgaattcaaatataaaacattacaaatgaataaggaatgtattattttgctagcattgccataacaaaataccacagtagactgggtttcttaaacagaaatttattttctccacagtagtaaaggctaggtataatcagggctgatttcttctgaagcctccctccttagtttgcagaggctgccctctccatctgtcttctcatggtctttcctctgttcctgtctgtgttctaatctcatctttttataaggatactaatcagattggattagagctcaccttagtgacctcatttaaccttaaatacctctttaaagaccctatctccaactacagtcacattctgagacaatgggggttaggacttcaacagacgaatttgggaaaggggcaatttagcccataacaaggagccctgtcaaataaaacagctttgagagcaaacaaaaattggcatctgagtgaaatatgtgggaagaggaaaataacttggggctttgctgttctcttcccactcttcctgtgacccgactggttccctgggaaatggtctttggatccccactgctgcttaagagtctgttttttttcccctgagttactgaggactgctgtcagtatgattgtagtgcaaattgatcctttgtgggaagtacaatagcaactggtaaccacaaagtaccagagggcaaaagaactgtagacgggtaaataaaaggtgtccgaaaagagcaaagggctggaagaatgggaaaatggagaaagtaagatatgcattgagaagactgatgattttttaaaatagtagatgttagatagatgatgagagagacagagagagagagagagagagagatggttaaaggaaaactggtatttggtctgcagttttgctgtttcaccagcttaacaccctacagtgaataacaaggtcatagatcatcacaactgcagaaaacctggagaatattttccatttcctcattatatagatgtggaaagtgagactccagttctcagaaacagttagatacaaaactaagacccagctagttctcagccagtgattttcatatcataccacacgctatacagttgtaggtttagaaaaaatctatggtataagaggaccatgtagtaccttacaatgcttctgtaatacccacagcatcataaagagtaataaatttaattattgcaacttaatgattcaacaattgtatatgtatatacgtaattatacatatatatgtgtatgtataaaatctaccaatacatatgtaatgcacatgtataaaatctaccaattttctatatatgcagaaaacaacaacaacaaacagtattagagaaaaccagggaattaagtcaaaatcatcactcccagacctgaaataaatttcaaaagctcttcgttactggtcctttatttgtccttcctacctcattttttgccccactcatataccacacattgcaactatgctaaactaccttattttttttagaaaaggacatcctcctcatacctacatttgtacatttcctttttatttgcttttttcctctcctgttgccacagtaaattcctaagttttctctttaaggatctgtggcctgctttggatacagttgagtgtagtgatattgtgccttgcacatatctctagaacaaaagttattctgttatagaaattacttatttactatcacttaagatcatttattaccatttactatcatactctaattcacagaaggcaaaaaataaacccttgaatggcaagaaatgtttaggcaatgttgggcaaattgtttatgaatagtgattgcaattaacatagagcttcatacttactggattaaatattgatacttttgagtcatatctctactcttagcaataatattggtgaatattctgtgctgtaagcaatgtaaatcataaaaacattctaatgtgtatatgggtattgaatattcaatgatattaaatcaatgttcaattcatatagatgattcttttggaaattaagaaatggatcccattttaatgagttttccccaacataaactatactttgttaagttcaacttgacaatttacaacgctcacatagctttcagatgtatacttaagatatatggaaatgaaaagcaaaatgttgtgaacaggaggtgacaagatattttaaatttaatcatcatatcttttataattaaccttttaaaacatttaattggcattattgttagaaaactttagctctggaagctaaatctttagaattgttgacttgtagacaagtcaaatatccaaaataaaatttcacccatcattagcagtagatgtatctagggtgaaattacacgctggattacttcaatattcttatatttacatttttatttttttcaaagtttctccagtgagcattttattgtgaaaatattaattatattttaaacttatttttagtttaagatgagaagatagtctttggggtagataaatacttttaaatctttcatttagaagttcctggactaatattatccaggtcccacttccttaaaaaaacctaatgtaacctttcccatataagcattgactgctatttcttgtttcacaacatttatgtggtatgtctatgcctatggtattgaatatatatttgaactctgctggcctattcccatctctcacagatcccaagacaatagagatcatgtcttacccatctttgtatctcttacagaaaatagatctcaaattctacagaagatattgaattgagagtttgagatgttagaataagaaaaggcagtgaaaggagagcctacatgtagcctaggccagatttacaaaagcagtagctcagaatgagatagggattcaacaaggagaaccaaattatttggtagtaagttgttgctaaattgtgggagatgaggaaaagggaataatgatagcagactccctgatattaatcccccaagagtgctctatggcacagtaattattcattatgggccccctctgtttggccccacgcccccaaaaaagacttctttagtcataaaactgaggggaatactacatactaaatccccttagagtttctcaatgtaatgcatatgcaaagatgctctggaatcctgcaggaaagacagctgtttaacttttaacctagtttcccaaactcatttcaccatggaacttctttaacatgcagtcaataaatgcccatttatctaatgtttaatgaagcatatgttggaattcttaaaattgttaatagctaatcaccgtgaggaactggtgagatgatggtaacattaacagaagtagagaaaccaggaataggatcaaaattggaggggaaggggaaaagggccttttgttttgagacatcaacttagaattgttgatgggctatccaggtgggtagataataaaagtttttgtgggggaggactaaaactaaagagttagacttaagagagaaatacttgagaatcacttacatggagatagatgatagttgaagttaaagaagagaacgagatttctaacggagggaatacactatcaaggaaaggattagagaaccctgggggagtgtgaatatttgtgcctcatttaattttcagaaccagatcatgaggaaagaatacttcccattttagagattaaaaaacaaaaccgaagcacagtgcttaagtaactttctcaaggccatataactaataagtggcagatatgagattttgagccctactctaaaacttgctcctcaatttgaatgtttacatatttatgtaaataatatattttacaatattaaaaacgtttttgtagagatacaataaccatataattttacaggattgtcttttttatttacgtttttctttggagtataatacatttttaattattggcctgagaagaagatacaatagattatttttggcaaatggtgcactcattcatgagagacactgtattttctaaagcaggctgatctctgcataatactggctccctgaaaataaatccttgctgggccgggcgcggtggctcacatctgtaatcccagcactttgggaggccgaggtgggagcatcacgaggtcaggagttcgagaccagcctgaccaacatggtgaaaccccatctctagtaaaaatacaaaaattagccgggcgtggtggtgcatgcctgtaatcccagctactcaggaggctgaggcaggagaatcgcttgaacccaggaggtggaggttgcggtgagccaagatcgtgccatggcactccagcctgggcgacagagcgagactctgtctcaaaaaaaaaaaaaaaaaaaaagaaagaaaaaataaatccttgcaatttatctgccatattgaatttgttctggaataatggggataaaatcaaaataggaaataaagtatcaattttattccactattattttatttattattttcatcttagtcatatggaattatatttataggaacatgttaaaatgcattttcaagataattattgcacacaatttaaacaattgttttgagtgactttttgtagaggtagaacagttctgtaaaattaaggtttggctttgctttgtttgacctagattccctattaatttcaaaataaatgtgccttatatttcaaaatcggatttcgtatatgaaagctcatgtcagttcacaacaaaaaaaaatcattaaaaaagaatagtgcgttattttattactgttttgatagcaatacctgaggataccgtaaatgtgtgcatgtacttttgtttacaaataaaaaacagttatgagaagacaaaaaaatctaatgtagaataatttattccactaaaacccagctttcctcatggaaatcatgcaacacctagtgagattatgctagcacatagggaaatttcacaaatgcacattcttagacatattaaccttctggatcagcattcaacaaaggtaaaataatgtacgctattgatatcagactccttagctccctattctggctcccttttaactatcaaaacacagtaatctgtgttttccttctttgtacatcagttattgtacctgccactctttataagcattcacttttctcttgtttttaagcacagtggtagcaatggccatgacttagaggcttaatgaaatgaaggacagattataaacaaattaaacccacactgctttctttatagaagcagctgcagagtgttctgaggtttttttttttccttgttgagtaaaggaactaataaggaaaatttcatggcttcaaggtctagagataagaaatgaaagttgtaacaggagaggagctgggaaaagcacagaaatgtagatttcgcggatcatgatgaaagccacaggtgacttggtgaccacagaaatgagaacacagggttgggtgtctaggcaggaagttgggaggctggtggagtcctggttcaactctaaagtctcagttatctcagcacatgctcttgtggtgctgctgagatttggctgattgcctaccccaaacctaaaaatagccgagcctcattcttttgtagtggcagccagaggcgcagctgtgtggggactggctatctttttccttagctttgacaaatagctgagagttggtgggcttgagtgtgcacctgttgagacagaaagtgctgagtttagttgacaacactgctgaaggtaatttcacactttcattccaattgatcaccgaaacttagaaaaattttctccttttctaaatccttctccttgcccatgaatatatacatacatatatttttctcgaactgtttgagagtgattgttaccaaaggcaattgtttttaaatcagaataacaaatctcctgtttgagtggctaactcaaattttattttcttatttaatttagtagaatttaaaagatttaaaatagttttgaaattaggaaataatatttttattcccataagtctaaaggtacaatctagcccattacatcactataaaaaatcatctccatatttattagattacaggatattccgctttaaactagaatttgcgttgcatacatttttgcagaaaaactcattcttaattttttctaaaacagtagattggatatgtgttaaaggttcatgttctagtacttctttaaatgcttattgtcagctttataaaatcattttatcacaaaaagttagttttctgtaggcttattttccttgataggattccttctcttacaaactggttatatgaattaaaatgtaaatgttagtgaattgtcatatcttgtaaatatactagggtagaactgatatctttatgcaaattagaaaaatattttacagtatcagttatggagttttttttctactcttcctttttctttgttaatattggcatgtgatgaaatcactactttataagtttgctactttgattaagactcagaaatcagagtggctgggtgtggtggctcatgcctataatgccagtactttgggaggccaaggagagagaggatcccttgagcccaggagttcaagaccaccctggacaacagagtgagacctcatctctacaaaaaaaaaatgaaaagaaatgagccaggcatagtgacaacacgcctatagtcccacctactcaggaggctgaggcaggaggatcactggagcctaggaggtcaaggctacagtgagtcatgatctcaccattgcattccaacttgggcaacagagcaagattatgtctcaaaagaaacagatcaatcagagaagtaactttaaatattttaatataaaaaaaggcaacatctcttagcaaataaaaatagcgacgtccttctctttctgtaaatctatccaagacatgagtgctgttatcgattcggtttagggttttgttttgtaatatttttttcccctttcacagcaatacattttggggtatggtttgctgacaatattttccacagtaatcagtggcttagctgtaaatagaggataagtattgcatctggggaatacacattagaaacaattggtatttctggttcatataaaggtggaaaaatacttggccagatgggcacttatttatttattttcctgaccagaaataacaggcaatgtgtgagaaagtgtggaaagcactgggttggccgtcaaaagcaggatcttacaaaggttgaaggaagctaatctgctgagaggttttctttttttaatgactttcacatagtatttttcaaagcctctgtgcattaacactcacgccaaaggaaatgatttgttttttcaagcacttggtcagtgcaatagctccgcagctaataatgacatatggcaaattttgagtacttactttgtgctacgtactgtaataagagctttgtgtatattatgtgagtaaatacttaggacaagcctgtgagagagctattattgttcccattttacagatgaagaattctgagttagaattagactttgaaagtcaaactttctccttccctatcccttgctgttatccaccacatcatgctacctccctgagctcagtgattacctacaatgaggtttaccagcttgtcctatagttacctgtgttataactgccatgttcctgaaataaattaactataaaatggtgcccatcgactgatatagagaccagtcattttttttttatagttttatctggcctggggttatcaagatactaggtttaatagaacttacttccagatttaaatgtctttgttcattcatgaaaatcaattgattggatccaatgattttagatctagacaactgtcagtcatgtaatctaactaactcattgtttaaagaggcaactgaggtgctgaaactttcaataattggattaattttatctttagtcagttatatcattagaacctaggtctctatttcttaatctcaaccaaaatatacatacatacatatatgtgtgtatgtaagcaccatttctgctaatttacaaaaacctagcaaaccagtttaagaaaaaaaaaagtttcctttgctcatgtaacgaaaaagtgaagaggtattacttacttcagatacagttagttttgggatctcaagtgatgtcacctagcccagtacctctctcaccctttctccactgtgttttcaaaggctcttaaaaaaaaaaaaaaaaaaagctcttagacattatctctcgatatgggacccattattagtcttagacttatatcattgtacctcaattccaatagaaaatgaaaacaccattctctccaacagaagacctaggattacttgtaattgactctgaagaaatcacctacacattcctgaatcaatcaacctagttcaggagtacagtgttctgattgggcaggttccatcagacacccactcctggaaccagagccaggtaagttcaacccaaaactgtcagagaggagcaggggtgggtaggccacaacgaacagagatacaacaagacaaacagtgaagaagaagatgaaatgggtagcaggcataataagattataaagtcttgtaggtcccaaactctgtgtgtatgtgtgtgcatgtgtgtgtgcgcgtgtgtgtgagtaaccctcaaaagtatacaagtattgtgcttcctgtaatgacagacacccttctgttgataataatgattcatgtagcccaagaatataagaaagtattctgtttgtaaaataaatatttagaatgggaataaatttgtataaacagaagcatgtttgattttctttaaaaagtgcgtgataaatatgatgatcccaggaggtttgttcgttatttaaatgtttaaacatgtgatatgtctctttcagaataataaatagtagggaatagcaatatagcacttttcggccgggctcagtggctcacgcctgtaatcccagcactttgggaggccaaggtgggcagatcacttcagatcaggagtttgagaccagcctgaccaacatggtgaaaccccatctctactaaaaatacaaaattagccaggcgtggtggtgcacacctgtaatcccagctactcaggaagctgaggcaggagaattgcttgaaccctggagacggaggttgaggtgagatcgtgccattgccctccagcctgggcgacaagagcgaaactccatctcagaggaaaaaaaaaaaaaaagcactttttaaaaatcataatggatttctaagattgtaatagttttggtatgctgattggctttatttttggctacatttattttagaatctctgcattatcaatgaactttcattcaatttcttttctttctttttttttttttgagacggagtctcgctctgtcacccaggctagagtgcagtggcgcgatctcggctcactgcaagctccgcctcccaggttcacgccattctcctgcctcaggctcccgagtagctgggactacaggcgcccgccaccacgcccggctaatttttttgtatttttagtagaaacggggtttcactgcgttagccaggatggtctcgatctcctgacctcgtgatccgcccgcctcggcctcccaaagtgctgagattacagtggtgagccatcgcacccggcccattcaatttctaaattaggcataaaaacaaaattatttcgtaacatttctacaatgacctcctttttctgttaagtttctaattctgaagacccaaattcaattttatatttcagtatctcacactgattattctgatagttacattaaatccctcgtttagaaactgatgcaagttactgttttcaaatgttcatgctttgaaagtacatgtttgtcatctgatttcaaatctgcatggttccatgctgattattttagataacttcaggctgtactccaatttttttctgagagatctctgaagtaagcttttcttactctgttacaattttaatgagatacattctatgtattagagtgtgaaatatctctttaggacaaaatttaatcatagtcagtgctccttatttaaaggctaaaggcatcatcaatttggcaaaaaataaacaacactatctggctgcctgagggtccagtgactgaccttgagttgaaatcccagctgcctgcatcatgtgaccatcaacattctgtttttatcccagtggtaataaataccttatactcaaaaagacaagagcaactcagaagagagatttggtacttttcaaagaaacgcagcagtaaaagttgcatgatgcttttcatttcaaagcaggcaaacagagctttattatggcagagcagtccaatttaattttcacttgtgtgatgaaactattccacacgtttgcattaatttatgagcctttgtctggttttaatgtatttaataatacatttatacactctttgttttaaaaataatgatatgttttgacaatgcactttttcaggaaaatctgaggtgtaacaaaaagtgataatggtaagatagttcccattttgagtattaaaaaatgagtgcatcaggtaggattgggtttggctgcgtgtatcagaaatccagaaatagaagtgtgttaagtaagagagatttgttgccttgccacatgagtgagctccagctggaagcagtacattgccggtagagcagggccatggtggtcaaggacccaggaaccttccatctttctgtgcaactttcggtcttcgatgtaacatcattgtctaaaatggctgctggacctccagcctctttccaggtgtcaggaaggactccagcagagtgaaagggtttgtccaatttaagaagcgccctttacacagctttcctccaaatcccactggatatttctgcttactttcccttgcagtggattatgtcaaaatagtctaattccttcttttataacaattggagttgaaagctttgtttcaatctctagtgacaatactttagattctgattcccattctctgagggcatacatccgtgttactaggttgttactaaatatgcatgaatcttaactcaagttttttaaaattccagtttggaacccttggagaaatcaatacatctgttcgtattttgcccaatagtctctatgagtgctttatctaaaaatcataaattcagatacatttttaatatcatgagactaaagaaaatatttcccgttgtcaacagatatcaagtttcagttataaaaaatgagtaggttctggatatctgttgcacaacagtgtgcctgtagttaacaataccgtattgtatacttaaacatttgttaagagagtagatcttatgttgtcttcttattataataaaataaaataaggtcgggcgcggtggctcacgcctgtaatcccaggactttgggagtctgaggcgggtggatcatttgaggccaggagttcgagaccaacctggccaacatggtgaaaccccgtctctactaaaaatacaaaaaattagtcgggcatggtggtgcgcacctgtaatcccagctactagggaggctgaggcaggacaaccacttgaaccagggaggcggcagttgcagtgagccgagattgcaccactgcactccagcctgagtgacagagtgagaccctgtctcaaaaaaataaataaaacaaaataaaataaaatttccgtttgtatactgtctttaagacccaaatcaattctctctgactctagtgggcactgatatgttctactgaagtccccatcaccaggtagcacacccatcccctagctgctgggagtgcttgttgcccacagctgcttccttctccagagacttgttcttaccctgaagaaagccaggagcctgaaaggccatatgtgccccacctcaggtcagtttgcaaccaacgactgaaagtacaagagtccaacccatttgccacaaggtgagatcagctctgggatgcaatttgccctccagagctccctgtgggatcatgtggaaattggtctctaggtgagatcgcattcttgttttgttttccccaagccctaaactgtccccttcacacagtttctcttttgagcactttctctttttattttattttttgagacacagttttgctcttgtagcccaggccgcagtgcaatggcatgatctcggctcactgcaacctccgcctgctggattcaagcaattgtcctgcctcagcctcccgagtagctgggattacaagtggagcgccaccatgaccggctaatttttgtatttttagtagagatggggtttcaccatgttggcaaggctggtcttgaactcctgacgtcaaatgatccacccgccttggcttcccaaagtgctgggattacaggcgtgagccactgcgcctggcctattctaattttcatcccttcactcacaaatgctatgttccatcaacagcttgagtgtgcacatgagcgcacacacacacacacacacacacacttctgtgcttgctttttcgtggctgcaaacctgctctcttgtgaatccctgaatccacgtatgaagccgaagcttttatttcattttattttttagttgacaatataattatacgtatacctggttttttttttttttacattaactcttctccttatttcagctgagtttctatttatgcacaatatttattgttccgactcaggggaagtttcaagacacaaaccttttgacagcctaaattagttcaggtctaattcagaaacagaagtttccagattagaaaacctgaagctaaagaagtgcttgaagaggaacagggattcatgcaaaactagactaggtaacagagttactcatacacaagaatcttggcaagggttgaagtgggcatgtggaaggggctggcttgaaaatcaggagggtcagagaaagagctgttattgttaccctttgttcctcctcagatgtctatgcgaaaggctctctgagatgagagcacgatatagctcatgccggttcagccacttaatcttttttgatttgactgcacccaggtttctttaaatctgagctttagtttccttaactgtaaaataatggaaaaattcctggcccctcctcacctggttgctatgaagattaaatgagataatatatggaaaagtcttagcatataataaggtctggaacatgatatacatttaataaaataatacattttacttattattatcttatacctttcatatgaatgttaactgcaaaacagcatagccggtatttgctccttcacaatagaaggtaatatgcttccctgttttactaatcagaaaactggcctcgaagaggttaaattcctttcttagaactattaagaggctaagccacacttcaaactcaggtgtgtctgactctgtagtcaatgttcttttcacttcatggtgcttttttcctgtaaagtgagtataatatttcctaaatcataataaagctttgtgcattggatgacataaatataaagggcatagtgtataattggtactcaataaattattccttttcctccttccctaggcaagaactaattttctttctttgtttagcccctgtattaccagccaagtgccttgggcataatatacgtaaataggcctagtatgttgaattttaggcagccatcttgatttttgtaacaaatctagttctctttaaactattgcttagctcttccaacaataacaggccttgtagttatcccacatggggtgatttcaaagccacagagggaagattgttcttaagttactcctgcatgcagtgtcaagctctcacaactttcacaagaagttaaaaactacaattttatgtcagtctctcctccagtaatcagatagcttctttgattgttctgataacccaagagggaatccttctgatacagaaggtggctatatctcatatattttgcaactcctcccaaaacatagatcgatcatctcaaagaactacatgggaaacttgatagccttttggaggctgagaaagaaagctaagccaaccttgaaggaagtcaacaaattgtcaatggcattttgaaaaactgcattgcaatagacatctacactcatacgttatttagctcccttagggatatgattactcttggggtccacaagattcgatgcatgatcatttgagaatatttgtggctactattattttttaaacagatcaacaggcatgacagaatttcatgcatgaatttcatgataaggcattctcaattttatgttttcacttaagtgattatctctaatgttcatctatttccttcttatttcaatcctaccctagtttcaacccatccttttttatttttttcttgtttgaagtttaccctaatttcatgactgagcttctctaaattccttaattaagtcctccttgtccatcccagtacaaggtgtaatcactttcccctatatctggattgttcatctggttgttatgtattgcattaagttaatatatgcaaatataagccttgtaaatacagagaccaatgcagtccaattttgggtagatgccacattcaaaacaacaataacaaaaattaattaagtagtcacacacttaaataactcaaaagtgttaaaacagatatgaagaaatccacagcaacatttattataaaattactctttctcttccttggttttgcggcttctcgagttcataggagactttcagtttccagtgacctggaaactcaccattcctcatcaccatcctttactgtagtaacttccttttacctgaccaccctgcatagtcacagaagatgcactcctgacaagtgatcctcaaaacaggtagtaatctctttgagaagtgtgaaatgtcttttgttctccttgtcgttcccatgattgtcagctgtgaggacccttgtcattctaccctcaatcccaattctgcagggtctggggattctggggattcttttttttttttttttttttgtagttaccaatcttatatagatacaataatttttatgtgtattgatgtttattgacaaccagattttaaggtccttagaaattggagttaattattatttatcatccaagctcctttccctctgccctcttattttccaacacagtgtcttgaattttatcactttatcgtttagttattaagggtgatttggtgaaatgtagaacagactatatgaattacctcagcttatggtattatatgacataataacagaaacataaatagactatcataaatcttaactttttctttattctttgtaatattttattagtcttatccatcttgcttggattgccaagttcttctgagaattccagtaataatgttatcattctatcgagcttattattcccaactgatcttctattaagccagtatgaattagctactgtttatgagattagattatgcactttaatctctagaagaagcaaaagtaatgaatacactgaatctgccactgagaagacactttaaactgaaatgtttcattatttttctaattcctctctcttttgaatctgagtatgtttttggggtacgatacagtgtaaaggtttttgtacatcaagtcatagacttggaaataaaacacaaacaactacccttttgatgaaaatacataaacatcatagccatttagccaacttttaaatttaaaacaataaattcatgattttagttggagggtaaacatgcatctttttaaaaatcaaatgtaaacacagaatctatactcatgatgtacacacatggacataaaatattgcatatattttgggagattcaaagaccactggactccaagttaaggatatttttctctaaataaacttagtgattgaattatagaaaaccacaaactaagttattgactgaagtataggaaaagtatagtgtattaaaataaagttttggactaattaacatgattttactaatagtgacaagaggatttaccaagttctgattttttctaatgtaaaaaaaatttgttaagtaagatctttcaattagtaatttctgaaaccccctctaagtaaattaaatttttatatccttgaagaaggatgttgatcagtctcaccttatggcaagtatctcaatatatgtgatctgtcacctagtcttttctctattttattatttctgtgtttgttgagaaaaaaattatttgtatacaagtgcatgtactatttaatgtcatgtaattaaatccctttgatagaaacagttaatgttagactaataatgtttttagctactggtgaaatacttcctcctaatgcgttaaatgcaggataagatcttacttgatactaccacgggagtgtaatctctcccaatagtgtttgtttcatcgaagttggctcatttaggtagtttgagtggccagagttgtataagtatgtttggcagtggtggatggggaatggacagcaccaaaccattctttctctctgtttcgatttttctcctttgtctattgctagttgcttattcctgagatatccttcacctctctcaagaggcttggtcacttaacttcattccaactctacacctccattggtggaaatggaaagatggatgaaattttagcccctgtttatggccagcatccgactagtccttctttcaaaaatgagtaaataaaaacttattatggtatctttgaaaagttgcctgtctatgctctaggctttaactcaataaattattttaatggaaactgtgaattcaaaggaaataaaagtatggcggggaattatgcagaaaatactgtaatatatgttgataaaattttcccaagttaccacacctccagtacctagaacatagccagccatataatagacactcaataaaggtttgttgaatacatttgtttaatattcctttttactcttttcctcccctcttctttcccatgcatttctagttactcacatttataataatatattcagtacattttttgtttgcgtcaagatgcatcatgagggaatcacctgaaatttcaagtcaggatgacctggttagaacatcagttccaaaactgaatatttagagatccttttcctatctataaaattggatcacaaaatatctctcaaagggtacaaagcacagcaccaaccatatattaataataaggcactgttacataaatgtcagttcattttctcatcaccttcttaaccattttgctctctcttctgtttcaagacagtaaaatccaaatctctgtcagtaaaagtatatctgaccactctaatttaataaaatgcagcaataaattgcatgactcatttctcaattattttgcatgacttactaaaagtataagacagggtacctgagggatctgtgagggaaaggaagcaaaaatcatatacatagaagtggttggtttcaagtgattaagaataacctacgagtaggtgaaaaaaagaatcaggacaatacaatagactgcaaccaaaggtggaaaaaactgtaaaagaaatagctttagaggtctcaaatctgctttcagaatgctaggatctagttttcgtaaattagagttctcagtaaatgtaggacaagtcccagctgtactactgtagcattaacattaaaactaagccatatcttgaatctccttttctcttaaacccccagaggtttcaaaccagagaggtggtcaaaatagattcccctactacttcccctttctcaataagaagctctcatctgttgaatttccattttgaggcatttagacagctgagagagagagagagagtttaaaggagtgttcaatccatctggtctgttttttccccaaattgcggaagttatcatttcagtaacattatatgttgttaagcttatacaataagatctgattttaaaacttaccacataaccacagcaacaaatattgtgttatattgtcagaaggattgacacatagatcaattgaacagaataaagagtctagaaacatacccacacaaatatgcccaacatatttttgacaaagtttcaaaataaattcagtggaggaagagtagtgttttcaacaaatggtgctggatcaatgggacatccacggacaaacaaaatgtacatagacctagacctcatacctactacagaaattcacagattagagtgagattatttttctctttcttacagaaatcacatccatattgtctacttctgtgaagttcagtatggtagccacttgccatctatggccattggaatgtagctagcatgaattgagaggtactataaatgtaaaatacacactggactttgaagacttagtgtaaaaataatatgaaagatctcaataataattttatatgcgttgcatcttgaaatgatagtatttgggatctgtttggttaagtaaaatacagtatggatgttagttttacccatttctcattatttgtaatgtgggtatcagacaaattaaaattacctatgtggcttggatcatagttctattgctcatagctagcataatctataatttccagtttcagtttctttatatctgaatgagaaataaaagatatttgtgaagcaatctgcacatagaactaaagatttttattatttttaataaaattttacatttgtctgtccaagcatttgaatcattttgcaaccatatttattgattatttctacaacattcagtttagattttgcataaataaaaacttttgtaagtgtatgacttaataaatattaagcaggatctagtctagttacttgggaacggcaaagccctcgtcttcatggagcttacatttttcagttgataatctttatgtaactctagaaataattataactggcttaactaagttagcttttgggtacatactcaacttgtgagagcggaacctcatgggtctaccaatgagttgagtattacctaaaagtatccatcttgccctgggcattagccaatgtacttttcagaggaaatgcagggtgtttgttaatctggcaaattacctgagtaggcattggttacatggaagtctattcagagattttcctctgtactacgttgtattgactgattgcttttctgactttctccctagattctgaattcatcaagagttctaggaggggggctagcgattaaaaaaaaggacacattaggtacaatataccctactcaggtgacaggtgcactaaaatctcagaattcaccactatagaactcatttgtgtaacaaaaaaccacttccacccctaaagctattaaaattaaaaaggaaatacaaataaaaataattttaaaagtttttgctgcgtgttagcacctatgtcagtaattggtaaataataagtgtaaataaaccaactgatggatgaaatattttgagagaacattaattcaaaatttaaaccagtcaatgtcacattcaagccagattgcccaacctagtatatcatgaccattgacttcaatctttaatatggattgtctaagtcattggctggaagggagcatctgtctttgttttgtcctttgaagcaaacacttgaaatcagtttagactctcatctagacatttttgttgtttagaaatatatttaatggaatctttaggctagattcagaagagaagtaagctgtcattacccaaggattgttaaccttatcaataaattcgtagccctagggcataaagatcatttgtattgtttcagaggccttcgtgtctagtaaattttctagctattgatttttgcaaatgtacaaaattaacaattgtgagagagcttttaacaagcttgatttcagttgaaataatatgaacagtaattgttttttttctgttcattgggtaataaaagcatgtatgtaattgggaggccccaatactgttgaaggtaaatctgatgagaaacaaatattcaaagactttgtgcatgcaagagaatcaatagaggcaaaaaaaaaaacctatcttctagagagttgacaggaatctatcttatttggaaattcaaaaggtattcatgcatttctgtgttctgtgccagttacattatttatataataaatgcttttccatattgctttttatttgaaattctcaatcctataactaattattttacttagggaatataactgtatcctttacgccttctctttgattttgtcaccatgatcatcaaaagtttctccccatcaataatccaggtagactcccagccacactcaaggcatcatcaatgatctcagagtactacattggattaattactaatttttcctcattgacttctgttttccacaattcaatatttttctaattttcatttatctgcttgcttcttcctaaagaaggctcatgtaagtttgtatatgtgacaccaatatctctttaatatgtttaatttccttgacgtttctaaatagggttaatttaaatttaccttaagacccaaattatctgaatgcaagtttccaaaaaaaaaagctatatatcaggaattttctaggattcaatttcaaaaacaactttcagagtatggctaataattcaaaggtcaacaaaacacctgagcccactacaatcccagtaccatacaggtcaaaatcaagatttggcaggattgtaggatcccaacgttctttctgatgttaaaaaatatatagtaaataaagttattttttgttcaacagtattttggaagtagtaattgccacattgtatatatgtttgccattagccataaacgtgattttaccaatttattttcactacattgtgcagaattccggaaacttagataaaatattttaacacctaaatatatacacacacaaacacacacacacatgcacacacgctactcttccatgcccccaatctttctctttatctcagagttcaagtgtagccatgatttgacattacaaaatagaaagagtactgttggtttacctgtcaaattacttttatcaagccattaatggtgcttactgtgtgccagacattttttctaagcactttataaatattaactcatttaatctttataaagcctttaaatgatatatgataatattctctctttacacaaaaggaatttaagacactgaatggttaatgagcatgctgaaggccacaccattcataagtggtaaatgggaagtgactctgggccattttgttcccaagtccaagcttttaaatattttcctctgctcttactagacatgatattgctgagaaaagttttggtcccctgtgcttgaatataagtataataattaagtcatcttcttttccatgctcaaattttactctcaaaatcatttttctgtgccacacacattttaacagtttttcattatatacttgttcttctgagtagaaattgactctaaaatacagacaaaaagaaattatatttaagataaagtaaaaaaaaattctgggtgaaggatacattagaatatgtgattcaatttttacaactttcatataagtctaatttctttcaaattataaagttaaaaatctttcaaataattactagtcgaattgaagaatatgaattgaagcagtaccatttagtgcataaattcaaggacacaattttcaagttatattttctatgaacagtcctccctgaagttgtgcaaggagaaagacctaaatcgaagttagtttacctacattaaaatgcataaaataataatagaaaaataaactgaagcaaggacaataatatggattactctccagctttcataactgtgtttttaaatgttcttcagcagaaattattcaagcgttgtttcctactacagaaagaattctcaggacttctcagaaatacgtcagtttttaataataccaatacctgataggagagcagggacaatttcagtgtcattcatagatgttgtcccagaaccaagacagcatctgctccatagtaggtacttaatttgtggaatggataagcaaatcagtgatacatatcgatggtgctttttctactttaaaccacttttaaatgtgttaatatcccattaatagccttctagatttatttgagtagaaattaattcttttatttgatagactagtaaaaggcagcctagacagtttaaattgctcattcaggttcactcaatgaatacacactgaggaaaaaaaatatatatatatatatgtatgtatgtatattcagaaataaagcccagccatgactttttgttcaaggttctttgtactatattccattctttgaactgaaaagaggagaaattatagaagaagcaatgttttaaaaaatagacataaatgcataaatcaggtaacacacttttttggatacataccccacaatacctgaaaaagtagtaagcaaagtcactgatatttaatagaggaatgatctgaaaactttacaaatcaaaataactttgcgctttcaatttttagaaattaagtatttctccttactgaattcatccgtatgtagaaaattatgctgtattatttcaccataagttttaatttaggagtatgggttattatttggaaagggaaatgtttctcaaatttacttccatgttttaaagaataatcctgttaatctctttctcacatcttctcatatatcttatttcacttttaatttcctgtaagcttatcattcctgttaaattactccttgccttttctcagcgatgattgataatgatattgttgagctgtgtctctttctaacacctagactactattcaaactatatcaatcactccattatatttttaaaacctagaatatactactgagatctctcttgacctggtattcctgtatcctgccatctccgatttcccacactgagcacctttccttccttcagcatcctttccaatcagttcagaaagctgcccttaatctgctattctgttgccaaaacaacatcattaatcactttcagttaccttctttgcttcctatacatcaaaacttgagcgcttcctttaccctcagttactgctccactagagctttcttgttttaacgccccatcttcttgtcctgtgtgttttggttttcttcctcttcttacttgatgcccttgttttctttttgtgctattattaccttcattttattttctgtgcatgagcattgcaaattacaaaatcatctctttccccctttgtttactacttatttggttccggtacttcttttattctgtttgtataaatatgtactgaaagcaactgcggaaaaaacacctagatgaattgtgatcctatgtcgtcccttagctgagaaacatttcattcctgagctgtattatttgtcttttctctgaatacatttttttttcatactggctattctcctgtatattctaaacacacctttgtgtaatttaggtgaaattgttggaattataaattgtttagttagtagttgtgaatcatgcttactacagacatgtattatcaaaaatttcacaagaaggatagcgtgatactcaggcactccccacatttcctcaagccaccaaagagttttttgatggatgttcttgtttattggatgctctaaaactagacagacagtaaagattatcttttcctgctgctgaagtttaagtcatttttcccctaacttttattcacacttccaattatgaacttctaacacataaagaaaattgagatttttgtcatgcaatgctgaaacccaaactgacatgtaggaggaaggagcagcagttctgtgggtttgtcaggatgctaaggacatgttgtttttcaaattcgttattagagtcagtgagtttattaggctgaggtagaaaactgtatgctattagtcaaatttaaactaaattcctaaactcaagtcccttatagctcaaaatctgtagattcaagtaaacacttctagaaatgtcctaatatcacattgaaggagatgttcaatatgattttaatttagctgtctaagtctgtatgcaaaaaaaaaaaaaaagaaagaaagtaagtaaagcaaagcaaataataacctcaagtgccaactctaattaattggtagtatcttcttgaactaaaatgtggagaagtcccatctggcctctgtaggagagtgcaatgatctattagccatgctaatagatcagcccaggagaaggaagagaacaggattgttgattgcctgtggaccctgttgtgctagaacatttttcgtatgaaagtctgcatttcaggtgtggtaaattgtttatcagaccacttattttctgatgtgttctactttatttctgatacttgattaaaggtatgctgtgaaagtagtgtagtaataatgactcctaaaatgagtttatgcctctgaaatatagacacacgattcttcttcaataactctgcttatctgcttttagaaagtaagcccggaagtttacggactattgcaatattagattttaccatgtgtgtttattattgataatctaaaggtgaatttattaagctctacattggctaaggagccaaggctaaggattacaattaaacagctcaattatatttagcaagcaaataaaaccttaaattataaagcttccaatgatagcttaaagctcagaaatggccagttttttaaactaagcaataaatatatttttaaaatatttatttctagtgttacacagatgaatttggcacaagcttttcacttccttttgtgaaaaacttgttttgtgcatattccgtccactattttgtgtgtaatactctgtcatatcaaattcgattaattaaacaacctttatgggcatgaaccagccttggtctataacaatttgcaacttcaaagagacaaagtgattttcaaattactgcctaaaaatctatttaatatatataaataagcagaaaaaatatctatagtctttactggagaaccatgcagtagggtggggggagcatatggattttattttggcaagtgaagaaaaaagttattaagacatacaatacaataaaaaagaattcacaacatttagcaacagattggctgtgggtagcagaggctcatgaggagtcgacaacaactttctaagatattggcttagaaaacatgagtgggttgacttacatgttgttttctggagttgagaatgtttttactttgaagaacttttaacctcctctacaagactttttagctacgaggtccccttatcactatgagtaagagaggaatgcaattctgagcagatttctcctaaaactttatatagatagatagatagatagatagatagatagatagatagagatagatatagatatatatagatatagatatatacacatatacatatatatatatatatatatatacacacatatatatttttgagatggagtctcactctgttgcccaggctggagtgccgtggcacgatcttggctcactgcaacctccgcctcctgggttctagcgattctcctgcttcagcctcccaggtacctgggactacagtcgtgtgccaccatgcctggctaattttgtatttttagtagtgaaggagtttcaccatgttggccaggctggtctcgaactcctgatctcgggtgatccacctgcctcggcctcgcaaagtgctgggattacagacttgagccatcgtgcccggcctgtatttttaaaagttgtctttactgaagaggtctgttctaaacacgtattctgtgaggatttgattccatcattttcacacctgttactggcctgacatatcacaatgttttatgagaaaatagaaatgttatgaattcatttttaaattgtatatattgtacaaatttgtattaagcgaagccatggcaggatagcagtctattatttgccttctgtgcactgcagagttccagcagaggtggactttcctccagtttattagagaattttaaaatgtcaaacttcagtcaatagtttatgctgtttctagacctaatataacaaataataacctaatattgcaggtcattttcagaagcagtaaaatgctattatcctactaaaaatttttggagcacaatcacatgatatgaatttcttacacaagcatataagcaataaaaattttacagaatcttaagtgaggaaaaatttgaaaatgctaaaaaaaaaaacagcataaaaacagagatcagaaagtggctttgataattcaacatagaacagcctttagcttttgggctatggctctcaaaatatccaaaaccagttatttttggtgtgtgcgtgtgttttctgattctatttgctcccactcttccaacagcagtcccctgactcttccaatccctcagactcaaaatctttgagtcagtttcaagtattcgtccctttttgtcaattcccattaaatctgcttttgacacatctattcacttttatctttttctaagtgctatcatcctagtgtagggcttcatctccattttcttactaattattttttcaactttcaaagaatcctagaagtgtacacttattaaaatgcatttcatgctttggccctactttaaagcctatactgcattgatttgaatatacacttcggcagtcaacgtccctaaccatctgatcataagctaattattaaattggtatttgatattttaatggcacttgaaaatttcaaagtttccacagttattttattggattttctacaaaaccatctgtgccaggtagtttttattacctatctcttatccaagaggaatataagattctttgaaatttgacaacttacagactacaaatctagcaggtgttagctgtggaacttgaactcatatcctcagattctaaaacagtgtcttagtcacactacccccagtggcttccctctctatccaactctcactgtccagatcatgttccataaccagagttacagaacaattataattaccttccccatccaaaggcttactgtgccacagctcatttctagctgaaattatttcattttgagagatgaacttggacaattaattttggaaatatgaatgcaaaataacttagtaatttaacaacttcagattagtgtagggatagtttcaggagtaaattaaatgttgttgactaaggaagagaaagagaaataatgtgataaaaattattgaaaaggggtatacggtaagccttgtgagataaattctctctactcttgggcttattcgtggtagacatagagctcagaataggttttgtgagatgggaaggaggaattgtatgagctgttattgagagattaaaggttattctgggaagaatacatgtttcagaaacagcaaaaggtgggctcgattcctggttgtcactcattagtcacgtaaatttggttgtgttgtttaacctttctcaacctcagatttatcaataataaaatgggaataacaatatcaccctttctggttcctaaaatactgaacataatatatataaagagttttgtaagaaataggcactcatacataaaaaatggttttattctctaccagcatttgaccttgggcacattatttaacctctctgttcctcaatctacctcttctgtaaacatggggaaaataacagcacctacaccttgttggactgttgatgattcaaagagcagccgccatttgtgatacccttagaacagtgctcaataaatgatataaatgatgtgactaattgataaagacaaaagtcttgtgtttcccttagaaagatgatctaactatactgagactcaatttcctcatctgtaggattgggacagtaatttttcctttaatgttttgctttagtatttaatgagatacgtgacgtatttcatatgcaacaaaatgctattacaatgcaaagagttctggaatatcgaatatgttacaaaatttggggagaaattattagagtaatagagaatttttaacacctaggttggacatttaattcattgatagagttctaatttaaataagattaaaggtttaaaaatccttagttttgtctttaaattttgttatactatcttaaagtttgctaaaaaattgctgtgtctataagtttactagatcatcaccggcaggcaagaccaagattatcatctggatgagttctgtttgttagagatagtaaacacgtgatatctactcaacaccctttgagagaaactcacatttcctcttgataaatgaggtcagatattggtatcatatttaatgtcttcttcaaaagatcgcaatctaagatcactgaaggactttagaatccttgctggcttttgaataatagatttctaaacttaactttgccctgccaaatttatgtatttgttttaatggaatgtatttaagggttccatgtaccattgtgctatttttgcatgcccaggcatgctcggctgagaaggcaggtgaggactgaaatccagccctttgtaaaggcatccaagacacactcatgggattgtgtctgccctgaggaagtagagccttccttcacataaaggcagtgtccctgactaggctgtggccctggtagctgagtccaccctagaggacactttgcctctatttttcctaaacgcgttgctgatatccctcgacttacagtggggttatgttccaataaacccaccataatttgaaaatattataagtggaaaatgcatttaatatacctaatctaccaaacatcatagcttagactagcctaccttaatcatgctcagaacactgagattagcctatatttgggcaaaattatctaactcaaattctattttataataaagtgttgagtatcttttattcagtactgtacttaaagtgaaaaccagaatggttgtatggatacttgaagtgtggtttctactgaatgtgcactatttcataccattgcaaagtcaaaaaattgtaagtggaaccattgtaaatcggggattgtcattatatactttagaggtaggcctgaatgtgatatagataaaaaattgattgtatttttaaattgtatttaaaaattgaggtatgcaattcctcaaggatctagaaccagaaataccatttgacccagcaatcccattactgggtgtatactcaaaggattataaatcattctactataaagacacatgtacacgtatgtttattgcagcactattcccaagagcaaagacttagaaccaacccaaatgcccatcagtgatagactggataaagaaaatgtggcacatatacaccatggaatactacacagacattaaaaaagatgtgttcgtgtcctttgcaggaaaatggatgaagctggaaaccatcattctcatcagactaacacaggaacaggaaaacaaacaccgcatgttctcactcataagtgggagttgaacaatgagaacacatggacacagggaggagaacatcacacactggggcctgttggtgggtgaggggctatgggagggatagcattaggagaaatacctaatgtagatgatgagttgatgggtgcagcaagccaccatggcatgtgtatacctatgtaacaaacctgcatgttctgcacatgtatcccagaatttaaagtataataaaaaaaaaattgaggtctgcaacaggcaaagccactaaagaaactcagatatttttcattgtaatgttgaaaaagttatgaaatttcactaagcccgtgtctatgaagtgggaaaataacagtgatatgaatattatatgagaacatatttgtaaaatatttgttgtatgatagatacctagttttgaatgttagctatcatttttggctcttataataggttattggaaggtaggtgtgactcctatcttttaagcatgcagaatactgaagtgataaatttcatcattaattttcagacctttgacacttacttcggtgtttaaaaatattgatgtatgcagacagtttatctcctaaatatgagggaatgttatcatgatcactcaaaggatataccataactcatctgacatttaaaatgtcagtttgattgataaatgagagtcctgggtagatgaatgtgatttaaatggggtttggtttgcatacagaccaaataaataatgattcagttctgaagactggctagactagggctagggcaattaattggggtgctgggacatgatatctgagcaacagatgctaggttatgctgctttggtcaccaacaggcctgctccataacaggcaataggtacatagacctgacatttaagagcagttaatgtaggcctcaagaccttgaatggtaattaactaacatgaagaaatggaacagagtgtcaggattatctattatggcacaatttcctattctgagcatgcccagtggtgggtcagaggggaggtcaaggaacagatgggatcaggaagtaaagagagctctttccagctaggacaggcctgaggggaccgaatagacaatgcaaggcagagaatgagtcacaaggaacaaagaacctggcgaaaaccagagccacactaggtttctgatgaagctggccaccatgggcttctctcatttaagacactctctcaatccctcacgttcttcaggttggcatatgactgaacttaaaggctggagagctgcagcctacatgaggctagcaaataattaatgcattacagagcacttaaaatatgatacagaaatatacaattctgcatgtaaatccaagtattatgaaggaccaacacagaaatatataggcaataatattatgtgaggccataagataatgactttttattataataattatgcctgatctaaatgagctatgtttgatttctgtgtactttcatagctttatagccaagcatgacttctctgcccagaaaatcctgcctgatttactctttagcttctctctaatttactttctttttttgagatggagtttcactcttgtctcccaggctggagtgcaatggtgcgatctcagctcactgcaacctccacctcctgggtttaagcgattctcccgcctcagcctccagggtagctgggattacaggagtgtgccaccatgcctggctaatttttgtatttttagtagagatggggttttgccatgttaccctggctgtggtctccaaccctgacctcaggtgatccacccacctcagcctcccaaagtgctgggattacaggcgtgagccaccgctcctggccctactttacttttaccagctagggactgtttctcattcaatacatatatttgtttgtctgctaagttggatgtagtagttgagtagtggagttgaaaactgagagattgacagcagtcagttcattgaggattgtgttatcacgtgcactgggttagatagtgcaccctcaaaattcatgtcttttctggaacttcaaaaatgtggtttttgtttgcaaatggggtctttgcagatgtaattagttaagatgatgtcatattggagtggggtgggcctttaatctaacatggctgatgtccttataagaagaagagaagaaatacagagaagacacacagggagaatcccatatgacagaggctatcccgagtgacgtgtctataagccaaagaatggcaaggattgctggcaataccagaagctaagaaagaggcacggaacagactctctcctagagtattcagtgagagcatggccctgctaatactttgattttgaacttctagccaccagaactgggagacaatatgtttctcctaaaaaacaaacaaacaactacaaaccctacccagtttgtagtactttttaacagcagccgcaggaaactaatacatcatggaaatgaatttaaacatcttattatctataaagaatgtgaactgtcaaagcttactgttccattggacatcagtttcgtgtatcttttatcgtataatgcatgactagagtaataatttcaaaggacattaaaaaatacagacattttcttgaaggtacccaaacgtttgaattgtgggtcaggccaatatcagcaagggcatttgatagagtttctcacaataaccttctgtgcatgtaaataactgtatcttctcaatagatttgttattgtatatttggtcttgtagacttacccgaggaagtcagataatagcgtatttcgatatactgtgagaaaaataggtacacactaaataggagtatgaaaatacacaaagaattacccatcagcaagagcacattatatttgtttttcttgaaacacccattctttcctccttctactttgttttatttttaatctggctctcttgcttatcttcaaagttttatctcccccaataaatcttcctgccatggtgaaggttaaatgtaactcttccatcatccacgctagcacataccatatgcatagaagttataaagtccttgaagacagagactctattttacacatctttgaattcaaagccctaaaatatttgagccctgaagaagttgttaggacattttagccaccagtgcatactctagtagtgacggtagtgatgtaagtacattcctcagcttttctgaacattagtgaagaattccttttaataaagagcaagattttccattgatactcagatggacaagttttggagtattctcagagatgaaaaaggattatttttcatttgatgtacatgtattctgtgattttgtgaacacaatggatgcttgctcttttcattattattgttattcctttgggtaaggcctttatgttgtcaaaaacttctatttaaaaaaagtgaaaataataaaacattcagccatttgcagtcaattattcttgccactggttagtatatttatttaccagggttcttaattaatgttactgagaggctcaaagatctgaaaaacagcattggttccaagtggctgcatttctttcttattcatttatttattttttagaaatgaggtcttgctctgtcacttgggctgaagcgtggtggcgcgatctgctcactgaagcctcaaactcctgggctaaagtgatcctcctgtttcagcccatgcctggttaatttttttttttttctttgtagagatggcatctccctgtgttgcccaggctggtctcaaactctgggcctcaagtgatcttcccaccttggccttccaaaatgctaggagtacagatacgagccaccatgcccggctagctggctgcatttctttaaggcccagagcctcctgtggtagcatctggatttgaaatgctggctgggtgcagtggttcaaacctgcaatcccagcactttgggaggccaaagcaggtggatcacctgaggtcaggggttcaagaccagcctggccaacatggtgaaaccccatctctattaaaaatacaaaaattagctgggtgtggtggcgggcacctgtagttccagctactcaggaggccaaggcaggagaatcgcttgaatctgggaggcggaggttgcagtgagctgagattgagccactgcactccagcctgggtgacagagcaagactctgtctaaaaaaaaaaaaaaagagaaaggctcataaacattgtctatgtctaagctgcaacaatgattgatattgtgaagattattaatagtgtgggtcaactgaaggggaaggaaaacaccaaaggagaatttttccctcccaaatcataaaggcattcatttttcagagaagaagagaggaatattactttcattaaaagaataggaaaattaaaattgttgttattagccacaaatcagggtagagctgtgtgaatccatggggagaatgtaagattataagcagaaatcaaggttagttttgtcttgtacttctggaataagaaagatgatatgtaatcagaccatgtctctgataattttgttaaattagatgaagaaaatcacatggataagaaaatgtaattaaatcactaaaaataagaatgtcattgttttcactttcttttgctaagtaggaggtgaggaaaataaccttttactctgtacatgagtaattccaatatcctcttagaaatgacaattggattgtaaaatgggcttgcctttgaccatattctgaaaggataatataatgagttggcaaaagaccccatgaatagagtttatgtagaaagcaacaaaaaaacacaaatataaagaaatgcctacaaccaaaggtcagtataattgatagcaagatttcaaggggaaaaattagggtcagggaagatataaaatttctgtctccttgttttggtgatttttaatctagaaataaaacaggaatagtgaaatattccatagtatatctaaatatccatctttgtggcagggagctagaaagattcaggattattatttataaaccaatttagactaaattcaaagactgaggagatacacctaatttagaagaaacaggagctctgagacctgactttgcatattactactaatttttttcttagtgctcgttttgctgcccaggctggagtgcaatggtgcagtctctgctcactgcaacttccgcctcctgggctcaagcaattctcctgcctcagcctcctaagtagctgggattacaggcgcccaccaccacgcctggctaatttttgtatttttagtagagacagggtttcactgtgttgatcaggctggtctccatctcctgacctcaaatgatctgcctgcctcggcctcccaaagtgctgggattacaggcatgagccaccgtgcctggccagggcctttttaagtattattttttcttctaaagttactgatgctcaaatgaaacctaattttgaaaaatagaatgtttgaaagaaatagattgaatgaaaataacacagctgatatttttagcaagattcttggatatagctttagaaataaactagccagaaggagcagtatggcaagattaccttttctttatatcaattagacatattgtatcgtatgacttatttagtactgaagatgtctgtgcctttctgcagttgtttttcatctattaaaagagaaagatactatctatgctatcttttcaagatccctgtggatttgaattttcaagtgtatagataaaccttgattgatgaaaaattgatggacaaaattaattttataacaaaggtaaagaagtgagtattgccttcataatgtgccccacagcttttaacagaatttctttaaacaatatttaatgtatttttaaacaattatatatttcaatattaaatcttaagtatgtttcaggaatatcttctttaagataattgatatatcccagttttcatacgttttaaattttttacgtctacagtattatattttcttttgaaaaattgcgtaacattaaggtagtaaataaaaacaaaaatagtttaatgtctcttgtgggaaatacagttttgttttgttttgtttgtttgtttgttttgagaccgagtttcactcttgttgcccaggctggagtgcaatggcacgatctcggctctccgcaacctccacctcctgggttcaagtgattctcctgcctcagcctcccaagtagctgggattataggcaatgcactaccatgcccggctaactttgtatttttaatagaaacggggtttctccatgttggtcaggctggtcttaaactcccaaccttaggtgatccgcctgcctcggcctcccaaagttctgggattacaggcgtgagccaacgccccctgcctagttgtttttgaccacatattttttctctgaaatataaatgatttgtagcccaaaagtttaagtctgaatcaattgtctgtagtaaatgctgcaccatctacatttgttaatgagaacaatacagaactaacttgaaaactgctcaaattttcccttgcataatgctcagtttttaaaatgtattgccttctgtcttctcaatgggattgctgctttttaaattttcattaattcctaaaccatattccattgtattttttttgtacatttgctttaagtgactgtctattggaggaaaagaaagtgtaggttttctggtgaattataatagcaatatgattcctggaatgaagcagcttttctcgtttggaatgaccataaaatggcaatacacttaacagtaatacccttgtctgtgttacagcaatgggtcttaatggttttccatacgtgaacttagccgcttgcctacagagaattactaagtaactagtatattccacatgtaaaaatctccagagggcttccacacactttaatacacgctgatatacaatataaatgcaacgtatcctgaagaaaaaaaaaaatcacaaactccgtgtgtggctctcaacaagctactattttctcattagaaaaataggaaagctggccaggtacagtggctcacacttgtaatcccagcattttgggaggccaaggcaggcagattacctcaggtgaagggttcaagaccagcctggccaacaaggtgaaaccccttctctactaaaaatacaaaaaaaaattagccagtcttggtggtgggtccctgtaatcccagctacctgggaggctgaggcaggagaatcacttgaacctgggaggcagaggttgcagtgagccaagattgggccactgcactccatcctgggcgacagagggagactctatctaataataataataataataataataatagtaaagctaataactatacaatatcttacctaaatgtttaagaacacctactaataatacttaaaaataccaaaatataaaaacaaaacatacaaatgtaaagaacatacagtcagtagtacagcaaatctatttgattacttttttcaaaattctattttaatttttttgctaattttaaagcactgttattaaaagaaaatattttcaattggttttattctcattgtatcttctagaaatactagttcattttaggaaaataaaaatagtgagagaaaacttttagctctgaatatggaccatgtcccatgcctgccactttgttctagtttttgttatttaattatcacacactataaaggagttcttaccaattcttttttttcttcagaaataattgattcttcagttttttaaactgctttattgaggtatgattggcatatacaccaattctcttttataggcaatgaaattggagatcagaaaaaattgagtaacttacctaagactacaagtaagtggcagagctagaatttgaccccagacaggcttcacatacaagttcacagggccatcagctgcctgaaggcagagaccatgatttgtatccatagtatttatgtatctctcatatctaaataaaatctagtcactattcagatttaattgatattttcaattacctttgtatttttaaaagaagacacattatagaaatttgatactaaatgtaagtattcagttctttagttaaattgaagaaaagcagaaataatattctgtattaatacattagtgaaaagtcagcagctaaaatgtaagagatgtttggtgacacaagtaaaaatggattgtatactttttgccttatactacctgactctggcatttagatataacttgttccagagacctgtcataacttatatgtttcagacaagaaaagctttgggttacctgaaatagtgtagttaaaaatcaaacgctgtactcatctagagggactttgtttatccattcaaaaatacatgaacagggctttatcttggcctatttgaactccatgccagagggcagcataacatagcaaagcatgctgacctctccttatcactgcccttgttgaaaaccttgagttcttcttaatagtctggtatatagttttaaaatgttgatattttgttcacagctatatgtgatctcctaaacctttgcttcaaaatagtctatttctctgttgtggtttgcttcagggtaaaagccctctgatttcccacaatcaggacagtaatttggtaggttaataagttatgttgtgtgttagtgaaatataagtgctaaggaaaataaaagtagtagggcaagggaaatcaggaatactagggcctggaaaagagcatgaaataatgtgttatgatgagttgcactgagcaggttaaatcagaacgagacaagaagccaactagatagagaagattgttccaggttaagggaatgagtggaaaaaaggctctcaggtgagagtgtgttcaaggaatagcaattaagactgtgactactggccaggcgcagtggctcccacctgtaatcccagcatttttgggaggccgaggcgggcggatcacttgaggtcaggagttcgagaccaacctggccagtatggcgaaaccccaactctactaaacatacaaagattagccgggcgtggtggtgcacatctgtaatcccagctactcaggaggctgaggcaggagaatcccttgaaactgaaggcagaggttgcagtgagccgagatcacgccactgcactccagcctgggcaacagagtgagactccctctcaaaaaaaaaaaaaaaaaaaagactgacttttataaggaagaaagtagtaagagatcataaaatcaagaggatttggtggtacagattagagacttgtacgttttcgtttctgtgcagtagagaaagaacacagagacatttgcaaaacaatttaagaggggattccttcaatacttttctaatatccctctcccaaaggcctgtttattcttcagctaatttttactgataatttgtattttttagaaagaacgcatctctttattttatagtcatgtatcatcaaattatgtagtatataattatattagatcattacatgagcaggaatgggaacaatcacagttgattcttgctatgttccggttatctattgctgagtaacaatttattataaaacttaatagcttaaaacaccagtcactttttatagctcatgattttgtgggtcataaatttgagcgtgggtcaactgggtgattttccactctatgtggtatcaacttgatccctaaatgatactcagctggcagatgagctggtcagcagaatccaagacagctgtactcatatgtatgttgctttggtggagacgacagggagacttgggtcaactagatctattgactctagtacctacatgtggcctcttcagcatggtagacccaggattgttgaacttatcacatgggagctcagggttctagagtgaatgatacaaaagacggaaaatataagtttctggtatcttcaggcctaaccctggaaactagaacagcagctctttcactgcaggggtccccaacccctgggccacacaccggtacccatctgtggcctgtgaggaacccagctgcacagcaggaggcgagcggtgagccagtgaagcttcatctgtatttacagccacttcccattgctggcattactgcctgaaccctgcctcctgtcagatcagcaatggctttagagtctcaggagcacaaccctattgtgaactgcacatgtgagagatctaggtcgcatactctttatgaggagtatcaggcaatctagtgactgatgatgtgtcactgtctcccgtcatgcccagatgggaccgtctagttgcaggaaagaaagctcagggctcccactgattctatgatatggtgagttacataattattttattatataatacaatgtaataataataatagaaataaagtgcatgataaatgaaatagtctccaattatcttaacactatccctcacctcccccccactaaccccagtctgtgggaaaattgtcatccatcaaaccccagtctctggtgccaaaaaggctggggaccactattctactgcattctattagagcagccacagaacccacccaaattcaagggaggaaacaaagactttacctccccagtgaagaaatgtcaaaaaaattcgcagctatctttaatccgccaaagcatacgatttatctctcatagagagatttctagttaaggtttttcagcaggtcatcttgatccatagtaaatctaacaaagggaatggagagctttggttaatctaatgattcagttaaatggagatccattaaaatagattctactataattccattcattatttttcacattttttctaattttttattattcatagtgtttttgtccaatgacctttaaaatcatgaacatttaatatataggaatggcatccatctgaatatggcataattataaatgaatttactttaatatctagaaaacattcttgttcgttctctaacttttagataaaagccatcccttcttttatttaatttaactctactttaaggctttaaaaacctgactgatagggaaaaagtccaaaactgggacgctcgtgtagactatttactgcaataaatcattgtgaaaaatatgggcagtcaagtgctggatattctatttctgtttgaaccctaagaaatatcaaccgtcttctcactggcttttagcacatctgctccatttaaaactatggcagggaggtgtgtaagattgaattgattgtctcttggagtttactgtgcttctttcgaaactttgtttttcagtaaaggcaattgcttcttgagcagtactggttattccacacccactaattatcatgcagccatttagagttgaaatggtaatcaaaccaatgaaagcccaagattagcagcgttccttcttcatttctggtagagagattcatctgaatatctataaaggattttgtggtgcattctctggcagatgcagtaaaacaagtgcaacatgaactttaaaatacagctttgagttttaggttgaattttaagttgaacatatttcaaattttgcaatttaattataggagttaaatgatcttaaaggatcattctaggtctgaatagaattttaagagctagattttattaaagaaaagatatattttaagtgataaaatttatatattttgcccttcagaaattactggttgatgtttctattaaaattattaagatctaaatatacaatgatactcgagaccaattctcatttaaggaatggcatactgtatgacaggatgtgaggtgttaagagataattacatgcctagaaggtgtagtgaatcatatgaccaaaagccaagaacatccagagaccaaaattcacagtcatttcaaatatcattactccctggtgtgtgttattctacttagaaaattgcatgtttgttgtttgtaaatttagagacaaaaaatgcttaaattaattttttcatcatttctaaaaatttgctttaatatttactagcccagtaaaatgtattcaaatcataattataaatatcagggctattgagcaggggaatgtgtcaactgccattccggaccttcttctggaactaattttgattgccagcagaataaaatgcatgcaatgaatacaatgaatgtaatgctaaatcaaataatcaagtgtttatgtttatgtattttgatccccctatacatttaaaataactctgttttattagaagttctgtatttgagataaaatgcacctccctctcatttttcctggtttgtatgtgagaccacagtatttcacagtagatatccagggaaataacagacaaaagaaaggagagcaggaagaatattttaagatttattggccagcggcggtggttcacgcctgtaatcccagcactttgggaggctgaggcgggtggatcacaaggtcaggatgtcgagaccatcctggctgacacggtgaaaccccgtctctactaaaaaataaaaaaattagccaggtgtagtagcacacacctgtagtcccagctactcgggaggctgaggcaggagaatcgcttgaacctgggaggcggaggttgcagtgagcagagattgagccactgcactgcagcctgggtgacagagcaagactcgtctcaaaaagaaaaaaaaaagatttattaatttgtcttcaacaaaatactaactctgcagtgccctcaccttgattccttacttattgaggactaagcctatttttgtggattgaaatgatgttaattatctgcatccaaatacccctcataggggcgactgtgagcacgtccctctactagtaacacaatactcaggtgagagctggcaaacacaggaagactgaaaagcccgacttggaatcctgacttctacattttttaactgtgtagttctgggagtttcttaaactcgtgtgcctcagtttttccatttgcatctgtagaaagattgtaatagaaactaccttctctgttataatgattatatgagctaaagcatgaagaaatataaagcagctaaccctgagttagctctcaagaagtattttattattaacttgttaataccttcaacttataaaaatttaaaaattatgaaattttttaaattatgagatttacataaagttttcagaatagtctaatcaatacagacagaaagtagattagtagggcctggggacgtggagaaaggagagtgattcctaatgagtatggggtttcttttttgggctgacgaaaatgttttatattagaaagtggtaacagttggccaggcgcagtggctcacacctgtaatcccagcactttgggaggccaaggcaggtggatcacgaggttaggagatcaagaccatcctggccaatatggtgaaatcccgtctctactgaaaatatatatttaaaaaaaatgagctgggtgtggtagtgcgcacctgtagtcctagctgctcgggagactgaggcaggagaattgcttgaacccaggaggtggaggttgcagtgagccaagatcgcgccgctgcactccagcctggcgacagagcgagactctgtctcaaaaaaataaataaataaaggaaaaaagaaagtggtgacagttgcataactatgtgaatatactatatatcactgaattgtgcactttaaaagagtgaattttgtggtgtgtgagttatagctcaataaaatgattttaaaaaataaaatgagaaggatgagagaccggtatatttcagaatagtgcacttaaaaaatttgtttacagaacactaattgttcagcatactttctactggacattactgtatatatatatatatttagtattatataaatacattatatgataaccatatctgataaatattatcttactttatagatgatgaaactcagatcttcaatgatggaagtgacttatctattgttgagttgtaattggatcttatatatatttccctgctcccacagagcctacatttctgaaaaagaaattatgtctcttgtgataaataaacaagaaacatatcagataaaagtgttgcattgagaacaaactgagttgagatagtgagtgattgggtagttattccagcttcagtagtaaagagaatctttgctgaagaggcatgtcagctgagatatgactgtctagaggaaccagtcatgtaaaaactgaggaagaaccttccagaaggaaagaatagccagtgctaagacactgaatttcttatattttgtgtttagaaatgctagggttatagttagcaagatagcctggaaggagccttcccatgttttctcatatatgaaataactaacatggaggattattgtgaagttacaaaaatacatgaataacacctagtatagtatctcactcgtggttggtatataaaaaatattgctgttctattaattcctcaatatatagctattctatacaggtcttatgcaaaaaagaaccttagtgaacgtatttcaacttggtaagagttagttacacatgggctgacacaatcataagcatggaaaatagacaatagattgaaagcattaacaatggtagttggaacttcagaaaaacccactctttcttaatctatgatgaaggaaatggtgggttttccagtggtattgaaataaaaggaaactttttagatggtggagtaaggtatgcaaaggtagcgagcgtgtgcatctatggctggagagaaatccaaagacaagatagaatcacccttttgctctctgtgaaaactctgattttcctttcatggactaaggtctacactctccaatcatcttagttgcatacactattaattcatcaatcaagctacgtcatcctttgtgatatgttttgtttttctttcttctttttaattattgtgggtacgtaagagttgtacatatttatgaaatacatgtgatattttgatacaggcatacaatctgtaataatcaaatcaggataattggaatattcattacctcaaacatttatcatttatttgtgttgggaacattccaagtctactcctccagttaatttgaaataaacaattaattattgttaactataatcaccctattgtggtacagaacactagattttattcctactagctaactgtatttttatactcattaaacaagcccctcttcatcaccccctccccactacccttcccagcctctggtaacaatcattccactttctacctccatgagatcaattttttagctcccacatacgcgtgagaacatgcaatatttgtctttctaggttgtgttttgattagacaacctcttatttctaaaatttgcttaaattatttgagtacttgatccttcacattactgccaataaagcaaaccacagttgaaacttgatttttttctaatattttgaatgtatgctgtgtgcaaaggtaacaaagaggaatccatttaacagaaaacagattgctaatatcttcatcatttactttagattccagtctttggatatcagatttttctctggtcttcatatttatttgttttggcatcagattgcattttcttgcttggtttaaaaaaaactgtatttttttccctgtattatcggtgttgatttcctctgttcttattcttcaaattatgcagagaaatgtgtacaaagttaggaggagttaacgctatataaaataaactatctattaatatcattcggttaattttcaaagaggctgtaaatagatcatggatataggcaaataccagatgccacataaaaggaaaacctcaaagacattttttcttttattaaaaccatcaacagtaagaactgtgacagtaggttttgggtttttttattgccaaggttattatcagccctctaccctaaataagggaataaaatgatttctagtttttggacactgtgttatattattctgtaactacaggaacataatataatgctacagtcaaaagaataagcttagaaatcatctaagtttaaatttgtcactcattttctagaaggatgaccttatactatctatttaacctttctaagactcaattgccttataaataaaatgattataataaagacttcataagttgccatgagaaaagtattaagcacagtttctgagataaccaatattgataataatataataatcatcacaaaacattacctttctccttgtaaaaattataacgttaatggttttaaaaatgtaattctagtaccaaagtgaagtttgtattatgttctagttaatatatataaaaatttaaagaaaaactaaaatacatatagctgtgaaaatactcactaaaccaacatagaaaagcatttgttttgctctgtaaatctaaccttgatgattatgataataaaaataatcactgttaggttattttacttgtgattaacttctatttatgtaccctccctctattgatgtttaacaatagttcatagctatgactatttcatttcatatggctgttcctaaaatcatactgaacatctgactccatattcttaagacaacttgggacctctatctcttccctgcaacaatatttgtgagttgacaaacataaaagcctatgctttagcacgcacaagagatgtggaaaggtaccatttaaattagtaccataaattttcctttttatgtttcctaacctcatatttattgaaatgcattaaattaactcagacatctaaggatataacatttaatttacaataatctttatggttacttaattccattaaccttatctttgaaaggcgtcaaattaagaaatacagagcctgtcactttcatttattcgggggaggctgtgaactattcagatgatgtatctttgattgagggaaggaggtgcccaagaattagtcaattacgcaattaaaaaccccaaacctttcctttggtatgtttcacacaaaatctccattgctgtgctagattacactggatgatgaatcactacttgaatcacttcagttttgattattcaaagtaaaaattgaatggttggcattttcaccaatttaaaagcctcgccgggcacagcggctcacgcctgtaatcccagtactttgggaggccaaggcgggtggatcacctgaggtcaggagttccagaccagcctgatcaacatggtgaaaccctttctctactaaaaacgcaaaattagccgagcatggtggcacatgcctgtaatcccagctacttgggaggctgagacaggagaactgcttgaagctgggaggcggaggttgcagtgagcggagattgtgccattgcactccagcctgggcaacaagagtgaaactccatctcaaaaaataaaataaaataaaagccttaactttcattttctcaccagattttagcttgacaaaagctatctttaagggttgcttaggcatttcagtttgaaatgtttatgttcttgctataaaatgtgtggacatgtgtgtccaaatatatacacacaagaaattttaggtactgtcatagtgttgggatcattaagaattgtgttttcatggcgagtaaattaatttcctctgctgtgagtcactttttggtagtgtatgcatggtttaaatgaaactcactgaactgtttttgtggattcactgcttggttgttttactaccctagagagcaattaggtgtatgtggagtgtgttgaacctataaaattttacttgtgtgatgactgcaaagaaaatgaaagtagtgtcatgcaatccatgaaaactctgctgagtttctagctagtctcttaataaagtttacacaattcaaactctccaatcatactgaatatcactgaggctcttaagacttgtgaaaatcagatattttaaatttttaaattgtcatattatgtcgccaatttccatttctactctatatttatagtacttttttgcattttgagtgcacaagtcaacccgtttggccatacatagcaagacatgtattggtgagagcagcaaaaaatatgtaactgctcgtttacaacttttgaccagtagcgaggtcacactgagagtaccgctcaggagaattgagtcaagttttaggctactaaaatttgctgagctctgtgacctagggacatattcctgactccagcaggcctttgaagaaatcacgctggcaacctcacaatagatgaacaagaaaatggatgaacacaaccatattataagaagcagttatcagacgcatgggttctggagccaggctgtttgctgagttcgaatctcagtgctgctatttaatgactgtgaccttaggcaagttgcttaactctgcctctcttaattttggaaattaggaaaagaactacttacattttaggtttgttggaaagatttatatcacttaaaatgtatacagcatgtaacaattattgaattatacttaacaattattatctaggggaaaatatactgatgattttgtatattgtatatatatacacacacgtatatatcagtaactttaaatggggaagtcactaaaaaaatcataacttggtgtaaatatacttaatctgtatgccacggctagttttttgtttgtttatttttgccaagtttctttaatttctgttggccttttggggtcaccccattagcatctgcaggatagcttacttatacaggggaaagtgtctgttaccagtacagtacagtggtggtataaggaaaatctattaaatgaagtcctgggtgtttatccctataattgcataaatgtatgtttctcaggagtagtgttgtgtaagtaaatggataaaagtcatagagtgctaaagctaaatggaaacaaagttatttagtccaattcccatattttatagatgagaaaactgagaatcagaaaatggagggatttgttcaaggtcatagtagttattgtctgagatgaggaaaatatccaaatgtctgcttaaatactgagatatgcttaagttagcgttgaaaatattccatttaaaatagcaatattttcttcctcctgaacatctttgtactatttagaaaaacctagaaagcatgctggaaaactatccctttttcccttgtcaacctccaattaacacaaaagcccaaactgtacactgtcccttataaaaacaacctaaaattttgagaataacattcataatcttaaaagaaaattacctacttactacatatgctggcaatgtacttgctgggcaatcccacttgaaattcatagaaattaaacagcatttcagaacatcattccaacacctaattaatgacagggagtgactgctgactaaagaatgtgtccatgatactttcaatttatagcaaaaactcttaactattgatagcagaaatgtgatatataaggatcttgttctgtcctttcaaaagtcaaacagaaccactgtcccttaaagctgatcggcaaaggaagaagctgggagtccaaaggatttatttatacaaaatatgtatttccctaatgttcactttccaactttgattagacattttttttttttttttttttttttttttagcgatggggctgtattagtcaattctcacactgccataaagaaatacgcaagatgaggtaatttttaaagaaaagagtaattggctcaaagttccataggctgtacaggaagcataatgctggcatcttctcggcttctgggaaagcctcaggaagctcaaaatcatggtggaaatgaagggggagcaagcatgtcatgtggccagggcaggaacatgagagagagagtgggaggtgtcaaacacttttaagcaaccgtatctcatgagaatacactcaccatctgaagacagcaccaatgggatgatgataaaccactcgtgagaaatccacccgcatgctccgatcacctcccaccaggccccaccttcaacactgggaataacttaaccgggcgtgatggcaggtgcctgtaatctcagctacttgggagacagacgttgcagtgagctgagatcgttccactgcactccagcctgggtgacaagagtgaaattccgtctcaaaaacaaacaaacaaacattggggattacatttcaatatgagattatggcagggacaaatattcaaactatatcaggggtctcgctctgtctcccaggcttcagtggcaccatcgtaactcactgcagcctggaactcctgtattccggcgatcctcccacctcagcttccccagtagctaggactacagttgcgccaccacatctggctcatttttgtagaaatggggtctccttatgttgcctgctttggtctcaaactcctggccttaagtgatccgcccatctcggcctctcggagtgctgggattacagacgtgagtcactttgccctcccggactggttttatgtgtgaaggaggctgctgctgatttcatgagtaagctggagaaacacattaaggaatgatactgtccccttagttgtcaaccttcaaaataggaaacaaataatagcaaagaggtaaacgtggcagaaagcaggggtgagaaagggaacaatcagatatgcgaaacatcaaagaacaagaaatagcaacaaacccacgccagaagccagcaagaaaaggagaactgttataagtaccagtaaaaatgctgaagaatggcaataaaaaggagaaaaaagtactcacaagggaggccttgaaatgacaataatctattccaggatgaaaagaaaaggaaacactactccaaggcaaaaagaaaataaaaagtaaggaaaatcaagatagatgaatatcttcaaaaaatcagcacaatggagatagagtgtttagggaataagaaaaaaaataaaagtagacagatacagaaagaagtagcaaatgcaaggagcaatatccctattattaatgctggcaaattgtacttatatctctttccagctatatagcatgttcctgggaaatagcctaaagcactgagaattagggataggagaatgctgttactgtgagaatacgaattaagtaatgccagagaaaggctttgctgccaatataatagctgagtgatcaggccacgtcatttctgtctgatgtttcttcctgtcgaataggtaatagtattatttctctaactcaagggacattaaaaaaatattcagttaatgtatatataaatggagacaatatagacagatgtttaagaatattttggttaaaaggacagactcaaagccaaactttctgggttggaaatccaactctttcattttctctcagtactgtactgtaggactctctttttatacactttttttgtactgtcttttttatacactgactctcttttttccttagtttcttcatctgaaaaatagagttaataatagcacctacctcataggattgctgagatgagaaaattaacaaataaaaatcacttagaccagtacctatcacatagcaaggaaaatctcaactatattcattgtggtgatgttttgttaataaacttttaatatgaatgtaacatatcacattcattaatatataggaattatatttacttacattgataaaagtcctatctgacatcatcttctgttccttcattatttttcccttcttcctcactttttcagttctgtctctcttggttcattccaaaaaagggtcatttcttttttgcctcaactgcagaatgcatattatttatcaagcaattattgagcacttaccatatacaggcactgttagaaagacatctaaggcacaattttttagtgtgctgaaatagttattcattcagcaaaagaaggagctcataaaaataaaaaagaaatgctatgggtaaatataagaacatggtgatttcacttggtcctcttggatgtaaaaggaagctttaccaaaaatgttaaaataataattgatggttgcagtgctgctgaattacatcaaactttctattgtctcacatttcactttctaatttgtccgttcctagtgaaactagaagctgaaaccacatttttactcatttctcccgttatcctccccccaccactataaaaagagaacatttatgcttaagtgcttctgatgatgtgttctcagtatctcattctgttagactaatagtcctcatgccaagttaaagtggttggaaatcctagcacaccttgcctaagtgtgttttatttatcttgctacaccccgttttattgtaatagtcttgggagagccccgaaagatggcattgacctatttctataaactttaagggagcaggggacgatctccctccataacaaattccaataaatgatgaggttaaaaattatagaaaggatatttctagagaggtatttttatgtgataaattttaatatatatgtatatagtttttaaacttgaatatataaaatatatactaaacttgtatatttatatatgtattaaacttgtaccacttaaaaattcttctgtagaaatatcttttctataatttttaacctcatcatatataatgatggtaattcttcgtacttcttactcctaattgtcttagttcaattgggctgctataataaaaatatcatagactgtgtaatttataaacaacgaagatttattgctgcagaactgtttctgcagcccaggaaatccaagatcaaaatgttggcagatttggtgtctggtgagggttctgtctgcttcacagatggtgccttcttcctttaccctcacatactggaagggcaaacaagttcccttggcctcttttataagggcactaatcccattcatgagggctccgcttatatgacctaatcaccttcttaaaaccctacctcttaatactgtggcattggggattatgtttctacatatgaattttggagggacacaaatattcaacccatagcactaatgaaatacagcatttttagagagcaatgtctactattttacaggcagcttgctactcgtgatgacaatacttcttcgatctagtatcccagcattgttccattaacaatgtatgcatcttaccaatgtaatgttcagtaaatattttgcatattttaagaggaatctgttgtggttttttttttttttttttttttttttttgagacggggtctcactctgccacccaggctgaagtgcattggcttaatcacagctcactgcagccttgccctcccagaccacaggtgcgtgccaccacgcctggctgatttaaaaaagaaattatttgtagagacaaggtctcactacgttgctcaggctggtcttgaacttctgggctcaaccacccctctggccttggccttccaaagtgctgggattacaggcatgagccaccaaacccagcctgattttttataatacaaaataatatacactcactgccaaaagtagaatacagaaaaacacaataaaggtaatagttgcctataattttgctattcaggaataaccagtgttacctgtttggcacagacattcctattgagaactatataatgatagctaatatttactagcacttggtacatacccatgtttcaattaccttatatgttaaatattatccatttatgcctgaaaataattttataatataagtactgttattagaccattttaaaaatgtgaaaattggtgcaataacaagatgcattaacttgttcagggtcacaatgccattataaaatggagccggaattctaaaccaggcattcaggctccagagcctaggtttttaaccactaagaataatacattttagtattttagcatacacatagttttggaagctgcttaattcacttaatatatcatatggttttccaacgtagttaaatattccataagaatgtgatttttttatgtctgcatataaatatattaataggatgtaccagaattgttttcatttctatttcatgaatatttagtttgcttctaatttttcacaatagaaatgatctagcatattttataaaatttttgagcagatgtacaagtatttagagactagtatttgtttaaataacacgtgttggacgttagtggggtatatatcaatgtgaaacatgaagtagatgtttgctttgtggtaactatgttccaggaacagtgctaggaagcactagggactggaaagctgtaaaaaagccagtctttctgttcttaaatatcttataatctaatggagagagaaacctgtagaatagtgcgtttcagtagaagcaagcttagtgtactgagaaatgaaaggcagatgatgaagtttggacaatggatggaaactatcttatcaagagttggggttataagaatgacagtaggtgatatgaagaaactagtgttttaagaagatatatgtggcagcattatagacatatggggatttagaacaggattatacctactgaactggacttattttatttctagaaattttgtgataataaataccatacattatatgttgttctcatataggagacgtaatatatgggtatgccattaatcaaaggctgattttaagtggaagaattcgttctgttggtttacagtcccagttataaattaatgggcttaccacgtagttgttcccagatcttggaagtattgaagttttttaaaaattaattaatttatttttaactgacaaataatagttgtacatatttaccgagtacaacgtgatgtttttgatctatgtgtatgttgtagaaagagtcagtcgagctgactaacatatctatcacctcaccaacttatcattttttgtagcgagaacattaaaaaatctattcttttagcaattttgaaacctataatacattatttttaactgtggtcactgtgaggtgttgaatgttttaggaaattctcagataatctcagggccaagtgttaagcagatcattctctgagactggatcttctgcagtatgtctgcgaacttttttatttcactctaagcctttgttgttgccttcaggggttactgactcacgtttaactcaaggctgactgagttagatatataccgcctatagttgatgggttttgttgccagaaatattcttttgcttatcagtggggaaggtttttgcttctactgctggatttaaaggtgtccctcaagattccattactcagttcattgagaaaagcttaaagctaacggaggggagttctgagctctgtttgatgaaggaggctgggtaaaataatagctcccaagttggctcaagttcttccagatgttcatgtttatgtaaaacttaacacttagagatattccatgttgtaagatgtctgtgcaaaagttccttatatcaaattctaaaatgatttttggtcatcaggtgcaaaaattaacactaatcatctaaaataaccaaccagatagattttcattctgtttgacttttgaaagcaaatacccctatgatattgagtgagtgttttattgtttgattttccttcaaacttgctgtaaccctatgggaaagatatgcaatcaaaataaaagaacagtatccaaaaataaatgggtcatgaagaattgtgcttaaaatcgttaagtaaacagacacacaccacagtgatgagattgtagaaactggaaaaaatgctgccagctgaagagctgcaaagagtttggcttttcatgaacttagttactgaaatgaaagttcctccctaggagagaagccaaaatcatagcacggtttgaataaaagtacacctttccaaagttactgcagaacaattatggccgggatcctttactcttattgagaaagctcggtaacctcttattttaaattgacttccattgagcaataatgcctccctgcttgcactgtaaggtactttattgggtaatgtgtttacaagctggtctcatttttctttttgtaataggagatgggtagcttactgctatttggaggtgactccaggaaacatgattttcaagatggtcattttaaaaaattgtgattattgggaataataactctagagacaagatttaatggacttacttccaatttattcagtatgtcaccaggttattgcagttctagttttaaatctgtacattcgaagtctacgttgttccctgatgtactgtatatttaggtttgtactactacatataggtgctaggtttagctccaactctcagcaggagcctaacctctcagaacaattattgtagccagatctttggtggccctactacttgctttttttttaaccactactatttctttaaaatcaaagatatggcaaacatattactaaaaggaagaaaacccatcttcaacaacattatggtgtttttcacttcaaaggcttattttgtatgcatcatttgatttaatttcctccaaagccttgggaaatgtgagtgattatcatcttattattgttgttgataaatagtagctactatttatttagcactaactctgtatctggaactgtggtaaacaccttgtagtggaaactaacaatagcctcaggaggctggaattgatattatccccattttacagacaacgaaatgtgatataaataacataacgtgccaagattatgcagctagtacataggagaactggaattcaagccctagttaaattgctttgacttcggagcctgagtgttgattgtctatggcatgttgccaagctattttatagctggaaagcctggtgatgctaaaagtttaaataccttgccctaggtcataaaattagttcccaatgccttccaactgaaatcccaaacattttttattacactttgttgtccgcaggactgctacccgcttatatggtactctttgaaaattaaacaaagaggcatcctccccacttcccaaatccacagaatagccaattttgaaagaaagcacgcttttttttcagtatgactctgctttattggaggatcacagggatggctggggggaatgtgggtatgatactcaagcacctttgtgcaaggtgcaatgcccagagccataaggagtggccccagttgtgctcatttaaaggaatagttggacaattctagataatattaagggagatatccaaaagagtttcctataagtatgtgctcttaagagctgtaaggaagtaaaattttgaccccattagttacatttctaacatgatctaacatcttcccttcactgccaacgaaaatgtttaagaagatataatctgacagcagttatgctaaaactcccctgaagccaaaatgtgtcacttctcaaaatgaccctcatcttcacaagcccttgaagaggagttgaggattatttatgaactaggttttaacctaaggtgatacattgtgctgcagttgttactgagcttagggatcattttgtctattcatttcaggttaccattaggttctttttcaaaatcaattccttttaattatacagctaccctgggcatatattaaatgtcttacaacattgatacgctttcccctgaagtactgacaaagtaatagatttaatgcgcaaccacaggcataaaaacccacacacagtgtaagcatacaatgagtacactgatactcacaaaagaggtttaaaaaaatgtctgtaactggggatgtggtggtgtgagggccccatgaatttttagcttggaggatatcttatcgtaccgatgaaccctgaggatatgcatgaaaacaagctcctactcacaactttttttgcctgaatggtaagtttgtctgcagggcttggtctgattgatttgaaggagcatggtctagaaagtggttctcaaactgttggataacagaatcacctggggggtctacctaaatgtgcaaaggcctaagtcttatcactgctttaatgaatgtaggtctctgggtttataatgagctcgtcagttgattctgatgagcacctaatttgataacaacatgtcaatgggtacagattctcaaacttggctgttcattagaattgcttgagtctcatttctagagactctgatttcattgatatgaagtgcagtttgggcactgggtttttttcttaaagaagttcttcaggggattctaatatcagcaaagttggagaaccacgggtctaggggcctcgctacccgatgtgttgtccaaagaccaccagcagcagcagcagccgcagcagccccagggaacttattggaaatgcagaatctcaggtcccacctaaaattaccgaatcagaacccgtattttaccaagatacccaggtggtttgtatgcccattaactcttgacacacacttgtttagggagtcaggtagagctggattcttaagcacttccggttagttggatgactgaaaaacctctctgagctccaatctcctcacctgtaaaacgagtttaaggaataacattaccaatattgcaggtttgctgagaagattcttgaatgcaatacctgaaactcagtttaattcctagaacagtgaaaagcctcattaaatatgaagtcccggccaggcgctgtggctcacgcctgtaatcccagcactttgggaggccgaggcaggcggatcacctgaggtcgggagtccgagaccagcctgaccaacatggagaaaccccgtctctactaaaaatacaaaattagctgggcgtggtggcgcatggtagtcccagctgctccggaggctgaggcaggagaatcgcttgaacccgggaggcagaggttgcggtgagccgagatcacgccattgcactccaacctgggcaacaagagcaaaactccgtcatatatatatatatttatatatatatatagtccctactagaagagagtccctgtgaacctttttttacactagtggccccagagctaatgaggccaagccccaccaatgatcgtcgtcacagacattcctgtttttctgatatttataaaggttccttttaggtatgaggtgatttttattcaaaagaacaaatgttcccagatgccaagtgtcttccgctaaaaggataaatgatcagaaagcaatccttagctacagtgtccttgaaggtgcattgtggaatcttgcactgttgtgcaattgtgaacaacttcatcagacagtactgcgtatttgtactgtgttatccttaatttttccctttagatcttaatttgttatttatttcttccctggccaagagctaatttctttacagaaactcatatatagggttccttttttcctcctcaagtcagtaacttctgcaattaactacttttttcttaatttctctaactttggcccaactaaatattttcccatcattcctgttttgccgccctcgagctaggacatggaacttacttgttcggaaaagcttctatctgattgaaagggcatgctaattctttctttatagtgtaattgtttcacatttaagagggaaggagaaacgcctaaagtaataccacagaagaaataccctcaactaatctttctaagcagtacgacaatgagtaatgattacagttaattaagttaggcaacctccatttccattcacttagtagcactgctaattatactcatgctacaaggtttctttagttcttctgtaatttggatgcagtactctttgtagacaagggaatacggtacgattaatgagatttttcccaccaacacctcctgttctctccaaatgaaatttccgcatctgaaaattgagagtagggaacggagaaaaaaaaaatcagtcacattttaacttactgccagcacggtccatgcttataattgccaaatattttatattaaagaaaacaaggtgtgggtttttttttttgtttgaaaccttgtaaaattgtggcttacgtaaaaatgaaataagtatagaacatggctttttaaaaatatcagtggcaatgataatgacactttatattgtatgcttttggtcgcattaaataaacatatgttgagcacatactgtttgccgggcactggatctactaaaaaaaaaaaaaaaaaaaaaaaaaaaaaaagcaaaccttaactgtaactctggatttcttttacatgaacttcaatcattttaacaacttactctaaagaaaaccaagaactgcagctctacttggttatattgttaatgaagtccttggaaaaatttagtttatatgctttgatcagatggggattgacatacttaagagttttatttttaatctgaaaatccacttcaatcttatgctctgggtaaacagtcattacagaagcctgacacaattctgttttttcaagaagcaggattcaaggtttaacttcaaatacaaatttgagtaagttatacggattattccttttaattctttttttaaaacacagggtttatgtggatgaagtttcgttcttaatctccatttgccttaagaattaacttctgcattgtggtttagattgagtttaagattgtttcagattttaaaatgtatttttaaaggtgtgtctggaggaagatatttgtatgtcaagcactgttggttttcataggaagttcaaatgtgttttcagcagcactggacgtttttagagttattttcttctcctagcatcacacaggtgcgcaactttataggtccagtctcttctttttgcttccttctctgcttctttttctttttcactaacaccagtttgcataaatgagtgcactgtcgagttcacgtgaataccagacaaaaatacaggtgtcttcataataatcagctcctctaagtctactttccagtttctgcttcagactcagataaatcctatataaagcagacgacacagttatttctagaggaactgaggttactgattagaagggaacgtaatcaggtagattgagccggtgagggaagaaaccattgctgtgagaggggagtgtttgcaaaatgctgtctgtgaagctgaatctgtgagaacacctcactattcacggcaaccggagtggaagaaacaggtgcaaaaagattgtgtgtttgtctgcttttgtgaggctggtcagagattctgtgcctgctttatctgtgcttggctatgactctacctccaggtttaccataccccatagaatgtgtaagagaaaagtaccaacagggaaatcagcaaaaagctttcctatgaaggtgtgtagccagcctccgcagaatttgaaatgtctgaggtctcatctggtgagtaaaagctgcagataaatgcaacagccattcagaagaatgataaattccacaagcattcagaagcaggcttccctaaaggtgactcttttggtcaatttgcaacccctgggatatatttggatgactcctgttccatatgcctttctataaaagttaaattggggcttttgttgtgaggaagggaagaaaggggtttgacaccaataacctataggataatgcaaatcactgaaataagaaggaacccatattctactttttgggttgtggctttaatgaactttgtcttcaggtatctaaaattatttctagtatgaagaaaagaaaaaaatatccagaccttaatctataaacgataatatttttacctcaaattaaatttctaaggacgtagactacattcataaactcattagaaaactaatgagggatttttatattaacaatagaaaaacctgtgtttcacatatatatatgggcttatttatgcatatatgtacatatgaatatgtgtatgtgtatatatatacatacacatatacactcacatttttaagaagtttttaatcaaagaagacggaaataacaaggatccttgtgaatagtaatttagacatgtttagacaagcacaacttattaggaagcaaactgggacaattgtaaacagtaattccaggctgcctaattatctgaaatatctcagaatgattttagaggttaaacacttattattaaatggtagcttctaaataaagtgaaaaggtgtagtgatttatcaggtttttttttaattatagaatatcctaaaattctaaattagcatatattctgttgccaatatatactgtcagtatatttgaagtatattaatttctaaattatgttacttttattaaaattccaaagagtttctgacttggacaagttttctctatctttaggaagacagctagtttttttttcaggggggtgagctaaaagagttaggataaagtacaccgcattaaattaaaaacgtgtgttgggaataaagacaatccaaagttaaaagtctatttggatctcaaattttcccataacttgatttgtaagaaaagttacccttttgcaagtcttctctctcatttggtctggactaagtggttgtcatttctcacttacagattgctgttttactaatctctttataaatatattttttaattttatatctgtattttattcatcagattgtcctggaagtacagaggccagttgatggtttatgagttcaagctgagccgaatatagctaagccctgtcttgcctgacatttcatcaaaagctgtgttgatttgcaatgtttaccgacctatttattgaaccttcacagcttgaactatgccaccaagctcgctgacattgctgagattatctctaaatgcatgtacaaactaaggaggaaattgaaaaataagttaaaaacaatcatccgtctatttattaaattatgcttatagagtccttgatttatgtatttgtttgattgttctccgcaaagccccatgacctgatttttctttgatcttcccacacactcttggaagacgatagattagaacagtggttctcactcttccttgagtgggcatcagattcacctggagggctggttaaaccacagcttgctggatgccacccccagagtttctgattcagtccttctgaagtggggccccaacctctgcatttttaacagattttttaggagatgctgatgctgctagattactaagaacagaaaatgagtgttctaatacaaagagcagaaaataattgttcttaatctagttacctgtgttctctttatgcgttgtttagtttacactgtacaagaaaataaacacatatcctcacaaaattgaagcatatattctactaaagattaatatattaaaatattgaataaaatattaaatatctatgttaggaaattgtattcctgctgaaactggcagtaaaattacttaaattacttagcagtaaaattactgttgacaaaagtaaacaattggtcattaggtctcaaatacgtaaaacctcaattttttttttttttcttgagacggagtctcgctctgtcacccaggctagagtgcaatggcacgatctcgggtcactgcaacctccacctcccatgttcaagtgattctcctgcctcagcctcccaaaaccctcaatttttaattactcctttgattcttattctctgcgatttctccctatgtaaagttttagtctattatatttttagtaaaatgaaagcatgatccatgagataagcacttgaatctatactatacatcaaagtctccccttttgggccattaaaactaagatgttttccaacttaccttaccaaagccacagtttgaaaactgaaactatgaaaaaactggatattttgcttaattataatgcttcgtaaaaaattagaacgtctttaaaaatgttaacaactaaagtcaaacattcaaaaattataacctttgctataaagttatatgttcattcattgtagtcactttcttttagtaaaatgtaagcttttgatgtattctaatggggcgcaacgtttagattaaatgtttaatatggataattgacttttaatgaaatttaatctagatgttcgtaactgagagttaggggtgaacatgcctttaaggatgtagacatttttattacaattattttctccatgtttttgattaaacatatcaaggaaatatatattattttttatttaacttttctaatgtattaatttttggccagtcctacctatcacatgcttcagcaataatcagagctttgatgacaatgtcacattattttaattcagatgttattccagtttgataagatggagctgatctttagaaaacaagtgtaccatatttctaatctttaaatattatattgaattatttcagcctggctcacttgccagtttttcccttttgttttcatgattaaagcaactgataattattaacatagataagatttatgacattaatttatggttttcttcataaaaataaagccttttttttttttttttttttttttttagatggactttcgctcttgttgcccaggctggagtgcaatggcgagatttaggctcaccgcaacctccgcctcttgggttcaagcaattctcctgcctcagcctcccgagtagctgggattacaggcatgcaccaccacaccaagctaattttgtatttttaggagagacggagtttctccatgttggtcaggctggtctcgaactcctgacctcaggtgagccacctgcctctgcctcccaaagtgctgggattacaggcgtgagccaccgcacccagccaataaatccattcttaacggaattttagagcataaatctgagaaaagaaactaaggctgtacgtactaggtctcctatacaccttgtctttcatcattgaatccttagtagttaatacctgcttggaatgtaatgggaattcaataaattaattaaataaatggatgagtgaatcctacagacaattttgccaaggaagaaaataaagacagggtatttttatttctttcggttttttttttttttttttttttttttttttttttcagacagagtctccctctattcgcccaggctggagtgcagtggcacgatctcggctcactgcaacctccgcccttcaggttcaagtgattctcctgcgtcagcctcccgaatagctgggactacaggcgcctgccaccacgcccagctaatgtttgtatttttagtagagccgaggtttcaccatgttggccaggcttgtttctaactcctgacctcgtgattcgcatgccttggcctcccaaagtgctggggttacaggcgtgagccaccgtgcctggccagggtatttttatttttattttatttttttgagacagcgtctccctctgtcgcccaggctgaagtgcaatggcactatctgggctcactgcaacctccgcctcctgggttcaagcaattcttctgcctcagcctcccaagtaactgggatataagcattcgccactacgcccagctaatttttttgtatttttattagagacagggtttcaccatgttggccaagctggtctctaactcctgtcctcaagtgatccgcccacctcggcctcccaaagtgttgggattataggagtgactcacaacgcccagccttttatttcaatttttactgctgtttgttttcttccaaatgaataataaatatgacattttattctgatagctattagattatgaattgaatgtgagaacaaaaggcattctggttttcgtttgttttaatattggactgaaaaaaaaaaaaaaaaactcatttgaaccgggcgtggtggctcatacctgtaatcccagcaatttgggaggctgaggtgtacagatcacttgaggtcaggagtttgagaccagcctggccaacatggcgaaaccctgtctctcctaaaaatacaaaaattagccaggttgtggtggcaggttcctgaaatcccagctactcgggaggctgaggcaggagaattgcttgaacccgggaggcggaggttgcattgaaccgagatcgcacccctgcactccagcctgggcgacagaggtagattctgtctcaaaaaaaaacaaaagaaagtagaacaaaaactcatttgagactttcaggatacaataatttgtttaccttttcagttttctgattcctcatggtgaaggaatcatatctcttcagtgacacacaaacacacacaggatatatacagttatgtgttaacaccagggatacattctgatcaatccatactaaggtaatttcatcgttgtgtgaatgtcacagagtgtacttacactaacctacgtggtatagcgtagtgcagacctaggttgtatggtatatcctatttctgtttggctacaaacctgtacagcatgtgactgtactgaatactgtaggcaactgtagcacaatggtaaatatttcaatgtctaaaacatatctaaccattagaaggtacagtaaaaatcccgtgttataatcaaatgggaccactgcggtatatgcagtttatcattgactgaaacatccttatgcagttcctatcttttcttttgggccacacttggaattgaaatggaagctggagaaaggaagaacatgaaataaactgatgtttttccagccagtcaaaactcagcctctgtgttttagagaaagcattcggaacacagttgagagagggagagaaagagaagtggaaggtttagagggaggtccccgcttgtttttatctcttcaagcagctctaaatttgtccaaagcagaaaaagttgtacttcgcttcactctatattcaagactcaaaccaagattaaacatgaacctgtgggaaagttctttttaattaaactcatgttatttgaaaatacattatggtaagatatttttttgaaagttaagagtcagattttgtctgcataatgaaaagtgactaaggagtgctgaagttatcactcaattatcaggaaatctagaaaaattactttccaataaaaatgagcatcaatgatttctaccacagccttttggttaaagagtaatgaggagaaattctgccatgtaattaaagataatgaaattatcaatcaaggctaagctgcattaggttctttgactaaaataattttatacaattttaagtataaattaagttaaaatatatacattgagtgtgtgcattaatgtagacagtgccaaatattcaacaaaattatttcaccacctttgatttttgttttttgttttttgtttgtttgtttgtttgtttttgagacggagtctcactctgtcacccaggctggagctcactggtgcaatctcggctccctgcaacctccacctccaggctcaagcaattctcctgcctgagcctcctcagtaactgggattacaggcatgcaccaccgtgcctgactaatttttatatttttaggagagacggggtttcaccctgttggccaggctggtctcgaactcctgacctcaagtgatctgcccatctcggcctcccaaagtgttgagattacaggcatgaaccaccatggccggctgatttaagcacctttggaatcataattattaatcataaatgaaaccaaactaaaaataaagtataccacatgtgagaacattccaatgaataaaatcatttctgtgtgagctagcctgctgttcaaatttgtttatgcttatgcttcagataatgtttacaaaagtactgacagattcctagaagcacaatttctaaacacttaccttggaggtttctagggccctaaaaatatttctagtcatttcaaaaaaccacaaaacaactacaaaaaatgtacttctcccaaaggccatacgtagcacatgcaaaaagagattctgcagagcattttggaacgtaagtagcttttgtggttctgtgtctcaaattagcctgttcttaaaagtctgcaaattaaaaaagaatgataggccaggcgtggtggctcacgcctgtaatcccaacattttgagaggccaaggtgggcggattacttgaggtcaggatgtcgagacctgcctggccaacatggtgaaaccccgtctctaccaaaaatacaaaaaaattaaccagacatggtggcatgcgcctgtagtcccagctactagggaggctgaggcaggagaatcacttgaacctgggaggcggaggtttcggtgagccaagatagtgccactgcactccagcctgagagacagaggaagactccgtctcaataaaaaaaaaaaaaagaatgataaattgagtcaaaattataaaaattcaacagacgctggcacagatttgagatttgaggaaccagtaaaaaacgtagtacatattgataaatggcaatgtggtgtcaagatattaaaattggttttaatcttattaaccaacataaaatatggaaaacttatacatttaagtgggcccagaaaaaagtttgcaaatagcattccaaaaatcgatagaataatgtgaatgctttgttttctaatcttcacataatagggttggactagatgatttataagatccagtatatagcccctaataataacccctttaaaaagtctttttttttttttttttttttttttttgagagagtcatgctctgtcacccaggctggagtgcagtggcacgatctcagctcactgcaacctccgcctccctgtttcaagcgattctcctgcctcagcctcccgagtagctgggattataggcacacgccaccacacctggctaatttttgtatttttagtagagacggggtttcgccacgttggccaggctggtcttgaactcctgacctcaggtgatccgcctgcctcggcctcccaaagtgctgggattacaggcgtgagccactgtgcctggcctaaaaagtgtttcaatagaggagagaaataaacaagatcctgaagggataagaagatgtaaaagttgttgctgatgttctgccgcatatttctttccccacccgagttccatgcagtatcttgctttgctataaacaggagtaagccagaaatatgaggggttgtgttaatgtcaccagaagcgacctttaactacgaggggatggaagtacttgaaaaaagcacgcagccatctcatcttctggtgcataattctgaggcatgttcctcacagcttctcagagattcaccagcaggactgagccccagaataatgtgctcattgacacacctttgattgcctccttacctttcctaatctcactttctctttcctctcacttgtactttttgtaatcaattgccagataaactgtgtacctgcacctcaaatccttgcctcagtgtctgtctggggagaatctaaagtaacacagaaggttagcgagaaattgtttcacatgcttaaacaaaacagggcaaaggcacttaagatgttagagggagggagggtgaggaaactcacacgggatgacttcactctgtttagtacctaaaagtgaacaggaggtggatcgaaaggaaacagttagtgaacctgcaaatcaataggaagggttagaagactggttatgggagatggaccagatagcccagtaagtgaagaaaaggctcatggaacagcagagaaaatggacatatatcatccatatattttgtttccatcctagtctaatttacccttagatactacaataatcccccaactcatctttgccacttgtgcttttgtccttttctactcactccatactctacatggcctaaaggttgagcttttaaaaacataaaccaggttgtgtcaatctctgattaaaattcgttactgctctgatgcgtccaatatctttaccaagaaccacacttcatttttcttccttttcttctgcagtcttgctgcatttcagccatactgacctgctgccatttctcaaatgccagtctctgtactgctattgcctcttcctggaatgctctcctcatccatcctctaactgccttgatcgccactgaatatacactaacatgcatattgtcagtcacgcagtagtagcttaatatgtatttgcggaataaactaatgggaaagagtaacagcatggttcagttgatggtggataatagtgatttactgagtcacaaacaacatcatctgatgccttagcaaagaggagtaggtattggagaaagaagacaatacttacaattctttacttccttgagctcattttatatgtgtgtgtgtgtatatatatatataaaacatatatatgacatatatgacatatttttgacatatgtcatgttatatgcctccttctctattatatatacaatgtgttcaaggaagtaaagatgttcaataaagttcaaggaagtaaagtctaaggtgtctttgtatgtagcactgaagtgatcagtcagagtccaggcttggctggatatcgaacagtggatgtgtgaagtagaagtgagtgatgccaattttaaagataatgagcagtttagtaggcaaggatttagtgtcagatatggaggttgtggttggcagtagtagtagttgtactgggaagctcttccacagtggtgaagaagcatgctgagaaaggccaaaaagtcaaagtagcatcttgctgtggataaggagattggcataaatggagtaaaagttgagggtgaaaagtgatgtgagacaaggacaaatagacaagttggcttggctaatgtaatacccatgatgtaagaaaagctatgctgagatagctaggctaattccaagggacttttgaggggagcatatcaggttatcacatgccaaaaatgtttcatttcagagactttagtcttctcattaattttatcgctaatccattcattttcaaaatgtatttcaggatttcacatcaggtcgactttaaatcttttgttcagatgaacgtttcttttcctaggactgagtaagacagtttgtcctatccagtgcttaagagtaaagcaagcttatgttgccactgcaggcaggattattaaataaccaattactattcagactgtgtcacatccctttaaattactcaagcaagagtcttggccgggcgcggtggctcacgcctgtaatcccagcactttgggaggccgaggcgggcggatcacgaggtcaggagatcgagaccatcctggctaacacggtgaaaccccgtctccactaaaaatacaaaaaattagccgggcgtggtagcgggcgcctgtagtcccagctactcgggaggctgaggcaggagaatggcgtgaacccgggaggcggagcttgcagtgagccgagatcgcgccactgcactccagcctgggcgacagagcgagactccgtctcaaaaaaaaaaaaaaaagagtcttgaacttgttcagcctgaacacatctgatatcctcagccaagtataggatgtaaattagatagcttctggctttactagtgtggaatcaggcatgctttttccccttaggactccatgactaatgacctgaattgtctacatttcaagactagtcagatctctaatggtgaacctatttcattgtttctgcttctgttttgtcccgtagtatatgagacaaaggatatttttatgtgcaaattgcaacaagttgagatactcctttaaaaatggattttctttccatagttgattagcgtatggtaccagatttcctagaaatgtttttatgataaaagtttcaggttctcgatgatgcaaggaaattacagacgttaggtaatgatttgtaatcaggacacatgagaggagttgtaactttactgcttaccctgtggctttgagaatcattaatcctcaatgggcctcagttttcatatctaaaaatactgctttttaggttcagttacttcaagggtcaaatgagataaaatatatgtgttataacaataaaatgtaataataaatatgaggtaccttttcccccagctttattgaggtataattgacaaatggcgattgggtatattcaaggtgtacaatatgatgatttgatacatatacattctgaaatgattatcacaatcaagttaattaatatatccttcacctcacatagttgccattataattttttatgatgagaacacttaagatctctcttagcaaatttcaagtaacaatagagtactattaactatagtcaacatgctgtacattagatccccagagcttactcatcttataactgagagtttctatccttcgaccagcatttccccatttttttccatccccagttactggctaccactgttccactttgctttgatgagcttaacttctttagataaaatgagttactttttgaaaaacaagtttaattggcaaaattgtatatatgtattgtgtacattatgttaaaaaatatatatatatataatgtggcctggtgaaattgagctataatagtagtgtttttaatgactatgtagccgaaagttccaaggctttcagctgattgactatgtaattcttaaatctagtagagtatcttctgatttgagagcagtatgaatcctggcagaaaactatgctggctatacacttttaagggtttgaactgtgttactttatctatatactctgcataaaatattctctctcctatacaggccagctcatttattcttgcttttctagtctgattccccctttctggaatctttttcctccatcgacttttggttctaaagcattcccatcttcaaaaattcaattcaagtcctagttaccacaacactttctctaacggcttgaaacacctcttttttctatgaacttttgttccacatagttatttctacccagttatcgacataattgcttgctaattatttcctgtggattaactttgattccataactttttaacttttttatagatttcctgagagcacgtgctgtgctttatatttctttgtaaatacctcagtagctctgcattttttttctctgtcatccaggatggagtgcagtggtcgatcatggctgactgaacccttgacctcctgagttcaagtgatcctcccacctcagcctcccgagtagctgggactaccagcgctccaccacacccagctaattttcgtactttttgtagagatggggttttgccttatcactcaggctgatctcaaactcccgagctcaggtgacccacctgcctcagcttcccaaagtgctgggattacaggtgtgagccactgtgcccggccagccctgtggttttttgtcgttgttttggtttttttgagactgggtttcactctgtctcgcaggctgcagtgcagtggcaccatctcggctcactgcaacctctgcctcctgggttcaagcgatttttctgcctcagcctcccgaatagcagggattactggtgcacgccaccatgcctggccaatttttgtatttttagtagagatgggtttcaccatgtgggccaggctggtctcgaactgctgacctcaggtgatcctctgtcctcggcctcccaaagtgctgggattacaggcatgagccgccgtgctcacccagctctgcatttttgaatcattgtttataaaacattgagcatcaaataatatgtttttaaatattgtataagtaatactgtgttcatagaaacgttttcttttggccgggcgcagtggctcacgcctgtaatcccagcactttgggaggccggcggatcacgaggtcaggagatcgagaccatcctggctaacacagtgatacaaaccccgtatctactaaaaatacaaaaaattagccgggcgtggttgcgggcgcctgtagtcccagctactcaggaggctgaggcaggagaatggcgtgaacccaggaggcggagcttgcagtgagccgagaccacgccactgagctccagcctgggccacagagcgagactccatctcgaaaaaaaaaaaaagaaatgttgtcttttacaaccatatatttatcatatttatcagtagtttaggcgtggtcttgaaaaggaacctccccctaccataatgcctttcgtttaggagatccccccattacacttgtggcttacattgaaagaaaaaaaaaattatccccttgtctatggtagaaaactgtgtcattcgtggctttgactgcatcacaatccattttagctttttgtcacttaacttgagaagaaatgaaatatatgtggagtgtatatccctgaagaaagtaaaggaccagctgttatcactatagagtttgtattgttgctgaaaataatctggttatgtttgtaaggattaagtagtttattcaacagatgtttggtagtaaacatgaatgagaaaaggcttgttcttatcatattcattatgaatgctgaggttgtgctttactacatgttttcaatgctcatcctaactgaaagtatgaagtggaaggatcaatttctgaatatttaaatgagatgttgattgccttgttataaacattaacaattttcctaagtgtttgctcttgagatagagcatctttaggagaactttatgatttgggctggcagatttagccaaattaacaggaatgtaccttcctaatgtgatcattcatccctaggaacaggaatctgggaacactgaggctatacttctgtatggtgagttatcaaagtgttaaacacaggcactattaatgaagcacagattctactttcagagtaaagctagtgttactatctatgaaaaaatattattatttatgttttcataataataacttctacattatatttattttcaactttttagaataaatctgagctaggaggttcttattttagttgttttccttctatcgtttttcattacgctcttgttgtttgatttggtctcacattttaaaaagcttactgtataagaaagttttatcttcaaaataatgagcactagaggttactataaatggaaatacaaaatgtggatttactaaagtgttttgacttttacctacacatttcttggagtaatttttaagttgaattttaagaattattttgctggccgggcacggtggtggctcacacctgtaatatcagcactttgggagtctgaggcaggcggatcacctgaggtcaggagttcgagaccagcctggccaacatggtgaaaccccgtctctactaaaaatacaaaatttagccaggcgtggtggtgggcatctgtaatctcagctactcgggaggctgagacaggagaatcgcttgaacccgggaggtggaggctgcagtaagccaagaacatgccactgcactccagcctgggcaaaaaagtgagattctgtctcaaaaaaaaaaaaaaataataataatattgccatatattcgaattacacaataataccagattgaggatattagaggaaaacaaatattatattttcaatatttctaaagtattttttgtcttggttatttttatggaattatattacatttatagtataacctaactcttaaccattttgaggggtaagtttaaagattaacttatcactattgacgaattattcatctacccgtggaagtgtctgcagtttatccatttcgaaacatctaatattacatgagaatttacttttctcattagattacataaacatcatgttaaaatgcaatatgtacatgtgacaactgatcttttgggaaaaaaaaagtccatgaatcactcctgtaacatttggaattaaattcattaaccaaaataatatcatgcttcatcttttatattttgcttccttagcatctggttcttagtctgtctaattacattataatggctctgtgttacaacagttgctagaagatttttttgggggggggggcaagaatgatgattttgcctcatattttggaatacctgctttgcaaatgtctttcctatatactagagccagaaggaaacaaatctaatgtttcttattcgtttgaaatttattgggagaccaacttcattcaaagatcaagaactctaaaatttttacatcaaaaactatttttttccccaattactttgttgagtactgcacttccagtcttgagatcgaaagtaatgttgaggccgggcacggtggctcatgcctgtaatcccagcactttgggcggctgaggcgtgcggatcacctgaggtcaggagtttgagaccagcctggccaacatggtgaaaccccgtctctactaaaaatacaaagaaaattagccaggcatggtggcgggcgcctgttattccagctactagggaggctgaggcaggagaatctcttgaacttgggaggcagaggtcgcagtgagccgagattgagccgctgcactccagcctgggcgacaagagcaaaattccatctcaaaaaaaaaaaaaaaagtaatgtttagccttgaaattgctaatacaatggacggtatccagcatatttcttttttgtatgcaattaatatttttactttatttattttatttatttttttgagatggagtctcactgttgcccaaactggagtgcaatggcgcagtcttggctcactgcaacctctgcctcccaggttcaagtgattctcctgtgtcagcctcccaaagtgctgggattacaggcacgagccaccgcgcctggccgatattcttactttaacagttgaataagttaatattttattggagctatgcaattagttaatttcatatagtgaatatattaatatcttatgaggaagagccacaattttagtataataatgtagataattataactcaggaggactatgatcaagatacactgtaaggatccttcaccatattttaccaaaatattattttatagttcaaagggggataggacggtacacttccaattatgctgcaaatttgttattattactgaaaaagtctattttcttcttcaagcaattaactattaatgtctttaatgtcaataaaccgcatagcgttatagactctctttgaatttctctgaattagaaataatttttgaataggaagattaacacagactcattttaattctgtaatggtagaaataattaatctccccttatctgtagggatacgtgttctaagacccctggtggatgcctgaaactgtggataataccaaaccttatgtatatattatgtttcttatatacatacacatataacaaagtttaatatatacattaggaaccataagagattaacaacaataactaatattagaacaattataacaatatactgtgataaaagttatgtgaatgtggtctctatctctcaaaatatcttattgtactgtactcatctatttttggactgcagttgatcatgggtaaccaaaaccatggataagaggcagactactgtgtattttattatatgcatgttatatataatatatgtaatatatattatttgtatccatttggcaaacaattgagatttttatttcatgtagttgctttttgtactaatatagttatatggttgttggaattatgtcattaaaacacattaagccaagcatgctggctcacgcctgtaatcccagcactttgggaggccgaggcaggtgaatcacttgaggtcaggagtttgagaccagcctggccaacatggtgaaaccccggtctctactaaaaatagaaaaaaaatcagccgggcgtggtggcaggcacctgtaatcccagttacttgggaggctgagtcaggagaatcccttgaaccccagaggcagaggttgcagtgagccaacactatgccatcgcactcgaatcgagcctgggcaacaagaatgaaacttcgtctcaaaaaagaaaaacacacacgcacattaagagaaattatgtttgtcgttttgtttattctctaatttgattaaattgaacagaataataagtcacgtatggcaataccaaatattatgctaaaaataaaacactgaaagctgaaaaattcaatcacagattattggtttatatgacatcaggcttcaggctgataggagacgtccaaatgataggcttattttgttccataagtattgggcacggttcttagtataacaaagaaataaccgtggattgagaaattgttttcctcaccttcattacttaatagtagaattcccttcaatgtgccacttaatattccttgatgtcagagccttccatttgagcagctgaaattattgacacccctctcattcttcaaggatgtgttgtagggactgctgagtttctgtagaggtttaagctttgtgggaaatgatgttgagtatgacaatgttatcagcaacattgtcaacttcatggttgcctattgacttagggaaaagtggagaaaaatatgacaattgctgagtgcttagttgcagtagctttttaattttaattttcaagcatctgtgtataagcaaaagaatatacacagtgccacgtatcatacccattgacaagtttatcagattttaattataataaatattttaattaaaatgttttttaaaattattaattttaatgaacatcaaatttctctcttgtgatgtgataagggcagtgatagaactgacatttgaacgttcaatacacaattcggccaccattcaataggcttggattgtgcccatggttctgttctgtactaaagacacaaagatgaacaaataaaaactctgcccttgaagccatacagtcaaaatacagtgtccttaatctggggtccatgaaccatgataggaaaaaaattacatctttattttcactaacctgtaactgaaaatttgcatttctttccctttatgaagataagcaacacagaacggtattagcaatatctgtgaatttattaccaatatttttatatcaaatcctagttgttttggatatcttgaaaaatcatatgttaatatataccagtggttagtatactaatcactacttttaatttgtattaattattatgcttataactaatgtattaatagcatataatagtattatattcagtattttacaattgcaatataattaatttcctttgttttttatatgcttttagttttcattttgcacatttgaaaacagtctgggaagtgttccatatgcttcaccagatgccaaagggatccatagcacaaaaatagttaaggaccccatatctagaagagacacaggcaagtacatataataccatggtacagaaaaataacagaggcttgtaccatatgctgtgaaattgggcataactctctcagtccaaaggactgaagaggaaatttttgatttggccttgaagcacacgtgattgtttctctagtggtaacatgtgagagagggcattctaaaaaagagaaaagtaggtgcaaagtcgaagtcacccggtgagagcttgcagggtcagggaacaaagagcagtgtactgtggcaatgtaaacaaacaaagaaacaaacaaaaaaaccttttttttttttaaaccattgttgggcatcctattctgttttcatttgtcaatgtgcaagattgcatttgccaagcagtttttattaatcattagtgagtagaaactattctctggctttttattttaactgactatatttcatatagacaacaggcaagaaacatcaaagaagagatcaaagctctgcattagcgttttaaatctcattatttcaaacaacatctacctgtaaggggaaaaaaaaccgtaaatctttttcacctccccacttcgtcgttgttttcagacaacgatcagtcacttgtctggcctgtgggccataattggctacctgtaaatctcaagagactgaaccatgtaactggaataattttttttttttagcactacactacacggctgttattcagttataatggtcaaggaagctttagatgctgtacttaggctttctaaatgtgtgctttatttggctttctgggagaaatgtcaatgtgaatttccagattataatgaagttcatccagaaaaacaactatgatttaaagaagcagaagaaacaaaccggactgaaaaaatacactaatagactaagatagtgttttcaaactgttctagattaagacaattttgcttgcattctttgttgagcaagaaggttcacatcttaacttttccaataatcctctttaagaccgttattattggccttgatttcaaacagaaaccagcagggacctgaatggacactactagttaaccagtctaaagccttatgttaaagctaaacagttatctctaattttcaaaacaatagcatgagtatatattaaaaagtggttgatctagggaacttaatattccaggatgaactatactaaatgaaaatatgtaacacattaaaatgtggtcaaacaagccatctatagctgatagtacaaattgcatatatatctactttattaaaattttaactggccaataaaattgatactataattctaaatataatttttatttaagattacaagttttaaaattgaacagacttaggtttaaatcacttctctctcttcttctttttttttttttttccgaaacggagtttcactcttgttgcccaggctggagtgcaacggcgcgatctcggctcactgcaacctccacctcccaggttcaagcaattctcctgcctcagcctcatgagtagttggccctccaccatgcctggataattttttgtatttgtagtagagacgaggtttcaccatgttggccaggctggtctcaaactcctgacctcaggtaatccgccctcctgggcctcacaaagggctgggattacaggggtgagccaccgcggccagccaaaatcacttcttaaatgtgttattctgggcccagcacggtggatcatgcctgtaatcccagcactttggcaggctgaggcggtccgatcacctgagatcaggagtttgagccagcctggccaacatagtgaaaccccgtctgtactaaaaatacaaaaattagccggcctggtggcacatgcctttaatcccagctactcgggggtgctgaggcaaaagaatcccttgaaaccgagaggcagaggttacagtgagccaagatcatgccactgcactacagcctaggtgacaggtgacagagggatacttcgtctcaaaaaacagaagacaaacaacagcaacagaaaatgtattattttgtattagcttagctcagcatgtttgcttgtatgtaaagtagaactgaaaaaaaaacctaataaaattaaaatagggattaaatgcactaaaatttgttatttgttctacgtatttcaaaaatggtagtcattctaattatttattttagttaatggaaacattagttttattgttagtaaaacaatatattgttgatacaatatctagcataattttgcctcttaatgaatcaatcagcttgtcctttttattcatattttccttaattataaaccaattttttaaaagtcataatctatcagtagaaatggtactttattaaattcggagaatagtatcatttaaggaaaaatattcctagataaaaaaatatacagtactatgaaattcacatgcatttaaagtcattattaatttataaagaatctggaattataacctgaactaaataattctatttttttgctgaatgaatgaataaataaatgaatctttaggaacttgactgtcctccactaaagttaatgactccttcaacatattacacattctgttgctttgttctcatttctattataaatgcaagtttgcttttttgcatatggaatcaccatctataaattcatagtcaatatggggttttaaataatcattaccatggaaattatacttaagtattagttctgttggttggagattatgaatttctaaatttaaaaaaatgctgatttaaatttattatttccagtgccctatcctatttttttttcatatctgctactgccttcctaataaacttgtttagaaatatatcttgacagcaaatggtattttattcctaccctcttggcatgtattatacacaaactttgttttttgttgttgttgctgttttttttgtgtgtgttgggggggggggggggacagagcttcgctcttgttgccgaggctggagtgcaatgatgccatctcggctcactgcaacctccgcctcctgagttaaagagattcttctgcctcagcctcccgagtagctgggattacaggcatccgccaccacagccagctaatttttgtatttttagtagagacggggtttcaccatgttggccaggctggtcttgaactcctgacctcaggtgatccgcccacctctgcctccgaaagtgctgggattacaggcgttgagtcactgcacccggccttaaacttcttttcgaaagctttctcttttatacgtattgagttaattcctgtttgcgctgtgacatctacctgactaccacaaaaccttacagccacttgcttctgtaaatggaaaactgccctagcatgacaggatgtgggctgaagacataaccatatcgaaaacagcaagctttttggaaatctgtgtttggccctcaatttcatggcctcaagtaacttgataattttctatttctaatgcctgtcagccacaacaggatctgataaccaactaaaatctctgttggaagtgaataggggaaaataggtgaaatcacatttgatgttgtaagggaagcttattgaagacagtggatgtgttcaaaacattatgaggcaaataatgaggaggaaaaaatatgaggaaatagatcaccaggaagccctgtgaatgtttatgttttggctttacatgattactagtaattaaattagtgaaaaatattttatggaatattcaatatgcccttaatgtacaatttgctgagcaataagaatataagactacaaacttcctcttattggaatatacattttattttttattttgttgtacttcaatagctttagggtttcaagtggtttttgcttacgtgtatgaattgtataatggtgaagtccgggattttattgagccgtcacccgagtagtgtacgttgtacccaatatgtagttttttatccctcattcccaccccctccacttctgagtctctgaagtcccttatatcactctgtatgcctttgcatactcataagttagttcccattataagtgagaacacacagtatttgattttccatttctgagttacttcacttagaataataacctccagttccatccaagttgctgcagaagacgttatttcattgtttatatggctgagtagtattctatggtgtgtgtgtgtgtgtgtgtgtgtgtgtggtgtgtgtatctcacattttctttatccactctaaggtggattctatatctttgcgattgtgaattgtgctgcaataaacatatgtatgcaggtgcctttttcatatagtgacttatttttattttggtagatatgcagtattaggattcgtggattgaatggtatacctacttctagttctttgagaaatctccatactgttttccagagaggtattaatttacacttccaccagcagtatataagtgttctctttttatcttgtccatgccaacgtttattgttttttgactttttaataatggccattctggctaagataaggaagtatctcattgtggttttaatttgcattcccctgatgattagtgatgttaagtattttttcatgtatttgttgatcatttgtatatcttcttttgagaaatgtatattcttgtcgtttccaagctttttaaagagattgttttcttcttgctgatttgcttgagttctttgtaggttgtagatattggtcagttgtcagatgcagtttgcaaatatttttttccattctgtcggttttctgtttacgttgatggttatttcttttgctgtgcagaagctttttagtttacttagatcccatttgtttatttttatttttgttgcatttgcttttgaggtcttggtcataaattctttacctaggccaatgtccaggagagtttttcctaggttttctttgaggagttttatggtttcaggtcttagacttaagtctttaatcctccttgagctaatttttgtatatggtaggagatagggatccagtttcattcttccacatgtggttgtcccattttcccagcaccatttattgaataggctgtcctttgcccaatttatgtttttgtatgctttgttgaaggtaaattggttttaagtatttggcttcacttctggcttctctattctattccaatggtctatgtaggaatagacgttttaaaatgttgcaattggaactatggataaacctttaagataataatttttagccactgttcattttaactgggggagaatgggaaaaaagtttaatcactttaactaaatcagttactttgtttacatatatttagctctgataattacaaggagattcacttttgagtttgaaaagtagattctaatgcctaatgagagttttcacattgtctttgagaataaacactattttaggttattactgatatttcagtttgtgaactaataattcagcttgtgaattttacccaattttataaattcacttttcttacttgggcgtctgtgtttgaattaagaatggttaaatgtttctttcatacgcgtccgtgtgaagagaccaccaaacaggctttgtgtgagccataaagctgtttatttcacctgggtgcaggtgggctgagtccgaaaagagagtcagcgaagggagataggggtggggccgttttataggatttgggtagataaaggaaaaaggggggttgttctctggcaggcaggagtgggggtcacaaggtactcagtgggggagcttttgagccaggatgagccaggagaaggaatttcacaagacaatgtcatcagttaaggcaggaacaggccattttcacttcttttgtggtggaatgtcatcagttaaggcaggaaccggcaatctggatgtgtacgtgcagatcacaggggatatgatggcttagcttgggctcagaggcctgacagtttctacatgatagtctctttattcaaaagaaacacactacattattattttaaaacgttattaacatatttttctgtgctagaaaattttaagaaacaaacatttaagtgggctaactcatttagaatttgtaaaatatgacaaaactctaggagaaagtttacctgtgaaaggagtctgttatgtaaatcaatagtgtaattatgattcaataaattatataaattcctaatgagcactatcaatttttcttttgctaaaatctactgatattctacttttaaattactctcacttttagtgttcccctgaggacttatcagtttggaacacttaaatttgagttatcgttctgttcttaggaaaaatatatttaaagaaataatgatttattatgctagatttatcattatttttatttgggattgcttttaatgtgcatgagttacaaagacataactgtgagatcccattttctataatttttttagtgattccatacatttctgagtttacattttttaaaaattatagctcaaaaaatgcaagacataagtaagtatgcttttctaatgggtcatttcagtcgcgtccgtgtgaagagaccaccaaacaggctttgtgtgagcaataaagctttttaatcacctgggtgcaggcgggctgagtccgaaaagagagtcagggaagggagataggggtggggccgttttataagctttcggtaggtaaaggaaaattacaaagaggggttgttctctggtgggcaggagtgggggtcacaaggtgctcagtgggggagctttttgagccaggatgagccaggagaaggaatttcacaaggtaatgtcatcagttaaggcaggaacaggccatttccacttcttttgtggtggaatgtcatcagttaaggcaggaacaggccattttcacttcttttgtgattcttcagttacttcaggccatctgggcgtatacatgcaggtcacaggggatatgatggcttagcttgggctcagaggcctgacaggtcagttatggaaacacatcaaagtactctagaaccaaaagttaatttttgaaagaaattaacttaatgtacagattttataggaattctggacgtatttaatatcgtgatgctagaagaatgtcttaccaattaatattactggatttcttgttgtgtatcaagttgtaacagataccttaatcacctaccagataggctcattcctgtgtccattccaatagaactctgattttgctcagatctccatcctcacaatttcacagtagtcttcagtaaagaaatgagactaccccttgtcacagaaaatgaatcatactttaattcgcttatatgcttccataccacttgccatttacgggtttaagtatgtgcatgagatgcaacctgaaccaattaaacatcaagtaagtttttcttgccaatgaaaagcgttcacttaacaactaaatgcttgagcatttatatgtagatatatatgtacatatatacgatgtaaaatgtagaatgcccactgattcatttataatttgatatgtattagtatgtatttaataagctcttataagactgaatggactctggatatgaaataatataccaagtatggtaacacatggtaacacatggacaaattgtagtggaatcaataaagcattcagagaaatacatcattattatttattctcccactttaggaagatttcaatcctagcattaaatgtaacactgtcttttttaaaataaaacctccatttctaagaagttatttgatgagaaaatatttgagaggttatctgatgagaaaatttgaagaaaaaaattttaactgtacaaccagttaattagaactttgtcaaataacattgcctttaattcccagaaatccaatacattatgctcagtgaactgtaacacctgagtttttaaagtggaatacttaaaaaaaaaaaaaaacaaaaaaaaccagccttctggggtaatatctcctctttggaagtttctttttttccaaaattatacttaaaggacgattcttttaatgaataaattttagagttatctcaaggaataaatagaggaaatattattttatttcaaagagaagaatgtctattgtggcaaacaacaaacctgaaataaataaaacgtgacagtctatgaagtccgtgagcctaaagaacaatggttattttactgtcttagaaaagtttaggaagtttggatttgaattcaaactttaatttgaacttataacgtcaacttgaaatcatttggaataaacattgaaaaccttctttgaaagttttatcaaaggagaaagaatttgaataccaagaggatggaaaggttaacttctgttatctgaaatatcttcaattgccttgagccagtttaaaaataaacaagcttactgatatagagggaaacaagtctaccttgtgaatataatttaaaaaagagaaaaaatgtcatttaccatattatttacttcctcattttagaaaagggaataaacatttattaattatgcactatcaggcactacgcattcaacacacactatcacattagttcttcccaaaagccatttgaagtagtttttctttctttttttttcttcttttcttttctttttttgagagatggagtcttgctctgttgcccaggctggagtgcagtggcacgatctctgcccgctgcaacctccgcctccctggttcaagcgattctcctgccttagcttcccaagtagctgggactacaggcatgtgccaccacgcccagctaatttctgtattttttagtagagacggggtttcactatacgttggccaggctggtctcgaactcctgacctcaggtgatccgcgtgcctcggcctcccaaagtgctgagattatgggcgtgagccaccgcacctggcctgaagtagtttctcttatgcccattcatcaatatagataatagggttcagagagatttttcagtaatttacacaagattttacagctcctaggtggcagaatctagacttaaatttagatctgatccaaaaactgtattttcctagctttagtaggacattaacaatacaagtgcctctttaatatgcttaggaatgcatttttatttatatgtaaaaccaaataaacaaataaacgctgcgattgccaacaaagtatctttaatgtaagaatttcaaatgctgtgcaaaattatcctcactaactgctcttctggtcccacacttgtcacatggctacagaatatactatatctctctttctcttccagcagcttcctagtggccacacagggaccatcctatccataggttatagttgctttttaaaatctaggcatttcctaggagctgatgagattttagaagaggtgatattaacatgaaaaaattggtaggggtagatttctgagatattctatccaaattcaggagttttacaattataatttagttaaatattgtacttgatacacatataattccattaatacactctgagttaattgattttcatttattactcatggttttcattttttgttttttgttttttgagacggagttttgctcttgtcacccaggctagagggcaactgtgcaatcttggctcactgcaatctccgcctcctgggttcaagcgattctcctgcctcagcttcccgagtatctgggatgacaggcatgcgccaccatccctgactaattttatattagtagtacagatggggtttcgccattttggtcaggctggtctcgaactcctggcctcaggtgatccacctgcctctgcctcccaaagtgctgggattacaagcgtgagccaccgtgcccggcttcatcgtttccatctttaacaaagaaatacatgatatttaaagaaattttaaaagtataattttaaaacagagggaaagccacccacagctaaaacatcctttctctaaacagtttattttttccttaataaagttagatattttttggtgtctaactttgcattgtaaaacttaatcattacttacattgctccataatattctgtcatatggttttgctgtagaactgatactgagttggtgtgccccttgtaagaatagtccagtcattttaaaccagcatctgtttggattgggccagcatctcttccagtgtccttgagtcaacaatgccttaatggtttctacatatatttttaaatattacctatagatagttcattctttatcttcttatgttgcgtgtcagagctattacgttagagctattatgtaattttggcttttttatatatcattgcaattaacactcttgtccattaatctgtttgggttttttttgttctctagttgacatcttatgacaaatcaataggtgtgtaaactatgtcgatttttcttggctgtaaaaaacagtaaagaatgcttacagtacacgttgtctttatgaaaggaagttccatttgaagaaataattaaaaaacaatctgttttgcctttaatgggcaagatgaagagttaatgccactatatactaaatatcttaatctcgacatgaaatgagaactattctagagatatgtttctagatagatatggaacaaccacaagttcatacaaaatttgttaattttaagtcatattttggacttttattaactcatatggagtgacgaacaaatccttaattaatagcagacatatcatcatctctggatgcttatctatcagagatcagcaagaaaacaaacacacggcatgctaaaatgggtaaactatgagaggcaataagaaacaatattcaaagttgtgggtagggttaagggaaactaatgaatactgtgatgcaggtggcccctggctctggggacaatagaaagacataacccaccactaggcctaaaaaaggtaaaatgtgagggagcaattactagatcctggaaatggaggagctgaggagagaccgcccaacaagagctgtgacctttgaaaaagaaatacagccacttacaacctgagctcttgcaggtgtaaaaagtagaggtttctctccaaagaaactttcctacccatctaaatgggaataaatagtaacgtctcctagaagcaaaatttattaaacgacctgtgctaacattcttaaatatctactagccgtaataaagaaatcaatgtactttatgttcttagttcccacaatttagcctaaatatttgccctggcatgcttatactggtccaagcacgcattaggtcatagcctgttcctcttccttatttgaaggtgtttttacctttctcagcaagtaacttgtggaaacaagttacttcctccttcctttgttctcctctgcctttgtctcttttgaaaagttctaagttgctagccaatcgggacaaatacagaatgtgtggtcctgttccagccaatggaaaccggacacagcagtagagtaaacatgtcaggttataaatgaccctgtctcctttgttcggtgtactctcgtggcaaaactgctggcgagtgtaccctttctgcaaaaagtaaaaatgaccttgctgagagagttaaatttatgttcgagtgctgtttctttgcagcaccagggaacaagcattctgtttctaaataaacattgtttacatataacacagggaaggagcagtaaagaggatacagcctccacacacctttgaaaagcactcaagttataagtctttagtgccgtgctacttaagagaagggcttgggtttgccctaggttatggttatgctaagctcctcacaatttttataccacatccaatgacagcagacccattcaagcagaattggtttacaccatgagaaactataattcaaagaaagttagcaacttgctcctaggcatacccatattaaccaatattattcagtatatttatatacagcgcagagaacaacaattttaatggcattgtcagtattctttgatagataagcaccagttttgtgatatttaaaaagctattataggtgttgaggcttcgttttctcttccgctaaactgggatgaatctttctgaacagaacaaatacatatattctgtcctatctgggaaagattcaattatgtgttgcagtccaaatatgctgtattatatttacaggtaaaatcatactagcagaccagagtaaataactaggtaagttcctcttagtgacaataaaaagttatattgctcagatagtgctaatagaactttctgcaatagaaatgttctgtatctatcatgaccaatatagtagccaatagccatatgtgactattgagcccttaaaatgttactggtggggctgggcatggtggctcacacctgtaatcccagcactttgggaggctgaggggatgaattacctgaggtcaggagtttgagaccagcctggccagcatgatgaaaccccgtctctactaaaaatacaaaaattagccgggcgtggtggccagtgcctgtaatctcagctgcttgggaggctgaggcaggagaattgcttgagcctgggaggcagaggttgcagtgagcccagatcacaccactgccctccaggctgggcgacagagtgagtgagactctgtctcaaaaaaaaaaaaaaaaaaaaaagagtctcatgtataaatactgttttggacacacatcgttagaagacagtaaaggtgacactgtaaaaattttaaatcattaataactaattaccaccccaatgtaaatttcactgatcactgtcagtattaattctacagtaacatctgtatcaacaaatttccatatccctttcactggtattagggaggagatatcaaaagatggtaaacccagagcataaacttgtagatgtttggtaatgaaatgggactggacctatttgagattgtttcacaattttaaatcagggattggttatatagagctttctttcttgtattttttttctgcttctatgtggaaccatctagaatgcttgtgttattgctttaaggaaagtttttaaagggattcttaaaaaatacagtattttcctagcatatctctgaggtgataaaagtctaagaatcatagtttatgtgttttattcagatccagctcattctctcaactgttaaataagattcttgagaacaggtattattttttacattctggaggatccttatagcacatagaactatactgagaccaaactcgataatttcttataattttgattctgctggtaaaacacaaacttgatattgaaaatttgaatattctggacattataatttgcttatgaatcattctgtttgatattcccagataccctttgctaaggcagctcagaagggaaatatttgttcttgcagtttgtgtggttacgtggtttgttgtaaactttccctttgacctaaagaaatattgtccctttggccaggtgcggtggctcgcgcctataatcccagcactttgggaggctgaggcgagtaaatcgcttgaggccaggagttcgagaccagcctggcccacatggtgaaaccccatctctactaaaaatacaaacgattagccaggtgtggtggtgcatgcttgtaatcccagctacttgggaggctgaggcaggagaatctttgaatctgggaggcagaggttgcagtgagccaagatggtgccattgcactccagcctgggtgacaagagcaaaactctgtctcaaaaaaataaaaaaaaaaaaagtcgtctccaaaatatagcatggcttcaaacagatcgcattatctctctgaaacattttaacttatagatttaaaaatatatcttacagaaacattatttagaaacacaactttagtttacctacctctataaaatctccagagccagagtaaagattaaaatatgcattcacaaagagctttttaaatcatctctttattttacatctcccaaaaattctggaagaaggccgggcgcggtggctcacgccagtaatcccagcactttgggaggccaaggtgggtggatcacgaggtcaggagatcgagaccatcctggctaacatggtgaaaccccgtctctactaaaaatacaaaaagttagccgggcgtggtggcaggcgcctgtagacccagctactctggaggctgaggcaggagaatggcgtgagcccaagaggcggaggttgcagtgagccgagatcgcaccactgcactccagcctgggtgacagagcgagactccatctcaaaaaaaaaaaaaaaaaaaaaaaaaaaattctggaagaagtagtgtttgatttagcactcttaagggacaccatacatttgatgttgttaaaatagcttacaggtttatattagatttctattatctatcctgtcttcatttttggatatcatgtaaatatgttagataaataaattgagattgatttctaacaatttgtatgcattttgagatggcttagaaaacattcaatgcagaagttgatactgtgactcataccaagcatgctcctttgaatataagaagacaaaacttctgaaatgaggcaaatttaaaatatgacaggtttatattctggaggtagtgctaatagcccccaaagctactgatacatgagtttgtacactacagaaaagagaattaaaaagaaagtttgcacttcattgcagttccactcttgattattaatataaatcgaatgtaaattagtgaacttcctgtaaacacaacatgagcaatgactaatattgatagtctactcttaggttcccttgaaattgttctgcttgtctgataaaaccataacaagggacataaaaagattgttttaatatgttgagtgaattgtacatgaaaaattacattcccataaaaggctgatctatgaatgctaacatttatgttgttcgctatttctgtgtacttataccacccgtgtgagtgttgcttgatttggcagaagtaatggaattttaaaaagcagttgcatgagcaaatatatctattttccatatgtacatatttgcaatttagcaagtcatttgcttttgtttaaatattcaaaacgttgtcatatgtgtgttgtacacattaagattttatgtattttaaaaattatatatgtgtattgatatatttgtatgcacacagagcaaagcttgaaatagcaaaaggtaattacatgcatattgtatatactactttgtattaaaaatgtagtttattgatctttaaaaccaaatttgtttttgtaataaagagtaataaaaaattagattatgattttttcctttcaaatatgtttagaatttaaaaatcttggctacccctttaacctaaaatctgtcttacttacctcaaaatgcccttgatcccaactacatgaaatttcttgctctttcttttttttctttttttttttttttgagatggagtcttgctctgtcgccctgcctggagtgcaatggcacaatctcagctcactgcaacttccacctcccaggttcaagcgattctccctcctcagcctcccgagtagctgggattactggtgactgccacgatgcccagctaattttttgtatttttaggagagatggggtttcatcatgttggccaggctggtcttgaactcctgacctcaggtgatccacctgccatggactcccaaagtgctgggattacaggcgtgagccaccgcgcccggccttcttgctctttcttaaatatattatgtaattttatatagcacatgcatatttctgtgtctgggacacccttcctccctgtatctactccttgctatttcttctagcctaatttagatccctctttctatgtttctctggctcttttttcttaagatttgtcaagtcatgctgaaactattgccttgtctttctcaaaagactgtaagttcattgatggcagaacttaagtgtatattagtatctcccagaactcactcagggcctggcatagagtagcataaaagtcagtgttgttgaatgaatgaagaaatgaatagaatgataactgctttctacaggtgattgtgtgtaaacaaaaagtcatatgattaatccttctatgagcaaaagttggctaagattacaattaaatctgaatgtgaagattgtactgcagaaaaaaaaaacacacattttcaatagttatgtcacaaaagcaacccatcatgatacaagtagaatctgcgaacatttcttttaaggtgcgtataaactcatggcaaatttatgttgcattagtctttttgatgttctgaactttcataaaaaatcaacatagtatttaaaatctattgtaaaatatattgaagtttcattgattttattaaaatattaattcctttattttatatctatatataatataatcaaatctgaaaactcatcaagattatggcctagttgattacgtcttagttattatttgtacttttccatagccaacatgcaataaaagtttggttctagataattttttcctgttttacaccgtttcaatcaaaacatgttacaattgagtaaaacaatctgaaccagccttttataatacatgaattccaagattgtactaatttgtcagtttttgcttactgtctttcacaatgatttggagacataataaaatgtgcaaccaaattagtgaaaataaagaagtatatatataattgactagagccaaatatgtatgcagatttaaggcctgatgttttagttcactcattcaaattttaattaaaaacagtacataaaaggtgctagttgctggagtatgatgagaaaacaaaacagtaacaagacaaaaactgaaaacatgtttcctatccttgtgaaacttactgtcaatggggaagacgtacactcagtcagagaaatgttaatatttacaacgtaaagtaatatttacattatctgtattcagaaagagaatatcaaggaagcctattctgttggagtaaagagcttatgcaaagctcctattgtgggaaggaacagaaaggccagggtaactatatctaagaagaaaattacaggctgggcacagtggctcacgcctgtaatcccaacactttgggaggccgaggcgggtggatcacctgaggtcaggagttcgagaccagcctatccaacatagtgaaacttcatctctgctttaaatacaaaaaattagccggacgtggtggcgggcacctataatcctagctacttgggaggctgaggctggagaatcgcttgaacccaggaggtggaggttgcagtgagctgagatcgtgacactgcactccagcctgggcgacagagcaagactccatctcaaaaataaataaataaaataaaataaataaataaaaaagaaaattacggtgctacaagacgaggaggaactacacagaagcctcttcattcaagaaatgaaagctcctgagttcggatatctatcttaaaagcagtagtatgctattgaagaattgtaagcaaagggtgtcttgatcacattcatctgtcaaatagctctttattggtgaggttatgagaatgtattgaaagtaatgtaatcaaagcaaaagaggtcagttgcttggattaagggtgttggctaagaagataaataattgattcgtatgttattctgggacccctagaagccaaagaaaacggaaaataagaccaattataaaattcttattttcagagacaagaaatgccttcaggaaaagggaatttttttgtataattgtctactaaaagaaaatgttcacttatgactttagtgtatatagaccaatttatttagctttaaagtgaaattaatttcaggatatttggtagtaagttttagcaaaacctaaagaaaatagtaaagcacacatttctgttattgatacataatgatcagatatatttccatgataaatgtgatattataaagcacaacttttaaaaaacatttttctagagattatgccttaatttcagcctgtggaacatttctttaggagatattcatggctgctctgtgtccaactacatttgggagtcacctcatactgaatccttttatatactgggtcacttgcaaaggcttaattgagcatttgactgtcatatgccacagaatggatcggacactataaataaaacacaaaagagagtttgtcttttctgggcttcatcttcttaaaaaaatcagctattagacaagcatatgtaagtagtcaagaattatgataaattttctaaataaaaataagtgcatgagagagcgtaagagtatttatttaattcaggtttgggatcaggaaggtctcactgtggaatatttatctaaaatgtaaagggtgaaccaagaaaacagtgatgtggaagagcattagaaaatctggaagaaacacatgtagctgaagcaaagattatgcttattttgaagaaccttttagctgcagtaaataaaagacaccaaattacctccaattctgtaaagcagccttcatgactattcttcactttgttcacaatttattatctccagcccgtactaaatagataacatcatctcctacttcactgggggcttgaagggagaaaacagtgaactaaacttttacaagacattatttgtccagctggaaataaaaagtagaaaaaacatagaactttctatgtatagaggttataaagaccttaattgctttttaatttgtttagttcatgcatcctttgtcagtctgataaaagctgtgggactcctcagaaaaatacacagtgaatatcctttacatacaaccttttacataaaaatccagcagttcaaatgctcctgcaatccattcataagccattcataatccattcctaaaccagcttttggttaagtatccctgctttcaagtatcttgataaaatagtaaaaggaccagaagatacataaatataaatagaaaagtaaatagaagtgtgtgtctgctttactagaattttgaaatatcatgtttaaactataaattttaaatttagtttatggcttaagtacagatcatatattcccataaatgtgagtatatacatttatgtgcaaaccttcgctcacaaactcatatgcttagtgtttgagatttctcagtcctggactgagagttgggaaaaagttatgttttctttaacattctctcatagaaccaaaataataggagaatcagaaaaacataggcctttacattttggcttgagatcagcttctcgccatacctctagtacctcagacaaattacttaacatgtttgtacctatattttatctactttaaaatagaaaagaatacctaacacaaattgttcttatgaggataatatatgaacattgactgaaagatttaagctttttttacttaaaattatcctgttatagatagccttttctcaagaagtacataaaaataataatagtaaagctttgtgaccacaaaaagctacctacagtatatgtatgatgtttaacatatataacttgatatatataatatgacatatgcttgatatatataattagacatatgcttgtctaatagctgatttttttaagaagatgaagcccagaaaagacaaactctcttttgtgttttatttatagtgtccgatccattctgtggcatatgatagtcaaatgctcaattaagcctttgcaagtgacccagtatataaaaggattcagtaagaggtgactcccaaatgtagttggacacagagcagccatgagtatctcctaaagaaatgtatatatataatatcgagttatatataatatatatgttataatatagaatagaatattctataataatatagtatagaatagaataatattctatactatcatttaatatgaaactcacatagactatatttgtagctgtgggtaaatacatgtatgtaattttggtatatatacgtggcttatgagggtttttatggagacatgaatatggtgttaactaaattattataagtccaatgagctttgtgagatggccagtcgaagcaaacaaattccatgtatctccgaagccatttcctctagattgactgaaaaaaaatcaatttcctttaataaacatattttacaagctttgtagctatcacttacttcgtggttaaagtttacatctatggaagattacacagtaactttgtgctcacatgattgagtatcttaggggtttttatagatacatacttaaatatgtcagggaacttcatagttgtatgattggatgtactgggaacttcttgctccttctccttaatttgtgaaatcaagagacagagttactgcaaatttaaacttgagtaagtcctttgctctacttcatttttctcccgagaggcttctttttttttaaacgtccttttgtagaggcaaaatgtaaatattctctgaactctacttctgtatcttaccgtgaagaataataattagctcattaatttcaatttttgtaatatgcttaggtcaacaagattacttctaagggctcctcatcaaatacccctgtgtactttaggttcttttacttttagcaaggctgattcaaagttttttaattcataacttttttaaaaatttttccgagagtcacattgtatctcctttatactgacgtttattatcaggctgtttttttttgagatggtgtctcactatgatgcccaggctggcctggaactcctgggctcaagttattctcccacttcagtcccccaggtagctgggattataggcgtgagacacaattcctgggtttatcattttgtaaagctggagcaatcagttaagaatggagaagcaacagggccgcacggtggctcacgcctgtaatcctaacactttgggaggccgaggctggtggatcatgaggtcaagagatcgagaccatcctggccaacatggtgaaaccccgtctctactaaaaatagaaaaattagctgggtgtggtggtgcgtgcctgtagtcccagctacttgggaggctgaggcaggagaagtgcttaaacctgggaggcagaggttgcagtgagccgagatcgtgacactgcactccagcctgggtgacagagcaagactctgtctcaaaaaaaaaaaaaaaaaaatgaattgagtagcaatagatatcatgagcctcctcatggcgccaatattcgtttgaacccgccaacttcacatttagatatatgtgtctacgttgctggatgggccaggctatttgctcatctctcagttattttactatcctgtttcatctttttccataacactgttacactcacctttttgtgtcacttttaccagagccagtcattaatgaacaagaaatgtctttatttcatttcaaaaaagcaaaatatttctttgaaaattaaacagttaatttccaagccactcattaaagttattttattataagttttaatatcagaattataaaaatatttaatatgtcatctggtaattaatatttattcttttttttgagatggagtctcgctctgtcgcccaggctggagtgcagtggcgcgatgtcggctcactgcaagctccgcctcccgggtttacaccattctcctgcctcagcctcccgagtagctcttagcagcttcttaattaaagaatccatagctctctaatgcacatacgattgtgacatatttattcgttactttaagatcctcccccagtgttgaattctaccaattgcaaggtgcttccatggctttggacaaagtacagaagaattaaataacttcacagccttcatggaattcacagtaaggcagatcccatattaactcaattaaaatatatttagtcaaagccagatgcagtggctcacacctgtgatcccagaactttgggaggcggaggcggatggatcatttgaagtcaggagttcgacaccagcttgatcaacatggtgagacccctgtctctactaaaaatagaaaaattagctgcatgcctgtaatcacaactagtctggaggctgagacaggagaattgcttgaatcctccgggaggtaaaggttgcagtgagctgagatttcaccactgcactccagcctgagtgacagagactccatctcaaaaagcaataaaaataaaataaaatatattgagttgaatactgaaataggggtaactttgggaagctatgggccgcaaagcagagaatgatgcattcagtttgggggagctaagattagtttcgtaaaggaggtgacatcttgaagacatctagaatttcaatagacatagaaaaaattcatcgtaagcagagggactagtgaatataaagaagtcataaagatccaaaaagaactcagaaataatcaagaaggtgagggtagctacatcataattataagagccaactttattgagtacttcctttgtcaccatgtgctaagttctgtattttaatatcctcattgaatgcttgaaataatttctatgaagaaagatctgttttatctttattttactgggaggctgtgaaatatgcctaaggtcacacagctatcacatggcaaaaacaagattcaaacccccacagtttctaattttaaagcctcagcataatgaacacagtattgtactgaacagaatgaatgaatgtgagtagaaaagacatttctgagaacaaagctggaaatgtatcatacaaatcaaataaacatttcttgagaaatccttggggaagagggcaatataacctctcaaacagtagccagaatcatcaacacaaatatgtattttaagttctcacaattggtctcgccatatgaactaaatgctagatatttacttgcttaatgctaccaatgaattttcaaatctttccaaggtgttaataattttattgcttttttataccaagagcaagaatcaaatgttagttgctattgatgtttacattttaaataacaactttaatttagcctacaatatttagcaattacacaggaatcctctgaaagcttttaaccagccccagaagtaaactggctttggatgctaatctcttgagctttcctgactgacaagtttcctccctagaggaggggaattggcctgtctcctaaattttgcatggcctaaagcagtgagtttagaagcacctgtgtttcctggcaacaaacataacatttgtggaaaagtctaattatttaaattcctctgcatttttctaattgaggataaagtgctgcattctaccttcgcattcttattttattccttggccctttaaataaaaaaatacataaaatgatgtggtcagctaaaatatattggacaaacaaaacccccttcctttatctccctctatcgctctctatgtatatatattatatacatatataaaatatatataaacatatatatgaaaacagatatttgtgtgtatatatacactaagagatattatagtttaaatattttttaacatacactttaaaatctaacagcttggattttaatattgggtcagtctttctaaagtgtttaatattttagtttggaagtattaattagcaattcatgaatgagtaattaaaagtgctttagggggcctttcacatcctataataaataccaaaccttttaccacatttcatactataaaatcttggaaccccattatataactatgagttattaatttctgttacctacttttaaaatgggaacatatgttattaacaggtgttgctttgaaatctatattagcaaatgttctaccttataattagtttttgacttatcacaaaaaagtattttattttttttaattacatagtcacatttcaaggttaactttaaaaaattctaaattatctgattttcatgggaaagagatttgatatttgtgccttagcattttggtatttttctctttctgtatagcaaacctttgaatgatagtctgtctgaattcacagtgaagaaaatgatcagaatattgactgtcaacagataatttagaaggttcaatcctatgataatcagggatattttccttatgtaaatgtgttgatttatcaagttcagctatgtcattgattacatctaggcttcaggccttctgtgaactgccagctctactcaattctggcttgtgaatgttatcacatattttagtcaaatcagaggttatattatacacatctgacatttttctctttgtactaataactttttttctttttttgtttttacatcatggcataagatcaacactaaattttaggagtgcatagtaagtattaccatagtgtaatgctatgccaattgttttctaacttaatatttgcaaaactgggttttatggttgtttctatgcgaattgagtgcctctacagaattttatccctgagagtatatgagtggtgagtgataagagatactgaatgtctcagaacatactagcatctgacagcctattggtaagatagtgtaagtaaagaggataaggaaaatctgacttgaaaggagaataaaatctgattggacagtctgtagccaagtttgcatattatggatttacaaaatgaggttgttttgaattcttgattaatgaaacataaactgagttgttttaatattgcgtgccatttgaaataaaatgcattttgtcacaaccctagaaatgggaggttatgtgttgtaaaatattcttgttcccatctagaagacaccatattttatagagaacagtggctgaagcttgttttactaggaacaagtatggtgtaaggaaataacaataattaatactggtggcacttagtgctatagtaaaagtaaatttctaattagaaaataattaccataaaatactgaattatatctttgtaaggcctttagaaattgaatcactaatttaatatataagtaagtcaatattatttttatgagaaaatggacaacttacgaagttgttgttatgttttcaggccatattccatttttcaccaaacaagttatttccctgatacactcacttaaatcatcagtaatacatataggtttaaaaatgttttgtacaattctgaaagcctatcttagtttaatgaaacataataccataaagcttccctttcctccaacatttgagctacaataaaacaaccttgtacaactgataacaattaactcaccacccccaccccattgcagtcattagaattcattactaaaagctcatttgtttatggtaaaataaagtataagggttttgaaaccaccactgcaaaattaggactgagacagtgaaagagatctaacttaactgactccatcttgcttctaacctccactaatttatagtttatcgtttaaacaaacatcataacagccctttcccaaagcagaccttcttgcctggggactagattgcctctgtaggactaacatcagccacagtattagaaattatggtttaggagtcatgcagctggaggcaacaagattctgacccccaccaaactgctcctaagatcagtgcttgagataatttgcagaccctgcacttgatggatcagctggcactacccatatcaataaactggctcatctgatcttgtggcctccacccaggaactgactcagcgcaagaagacagctccaactccctgtgatttcatctctgaccagtcagcactcctggctcactggcttcccccgacccaccaagttatccttaaaaactctgttccccgaatgcctggggagaccgatttgctgatttgagtaataacaaaactccagtgtcccacacagccagctctgcatgaattactctttcttcattgcaattcccctgtcttgctgagtcagctctgtctaggcagtgggcaaggtgaaccccttgggtggttacaaatttgggggctcacccaggattgcccctgtggctacctgcctgttgtttggtggccccctttcagtgatggatccagaaggcagcccaagtggctgcctaattctcttggactgggggctgactctgttactctgtctactggtggggtattccaacccaatgtgcgtggacttaattgcaatggaaaaatagtcatggggagatgtcccttaactgtagccctattacagggtatctgtagcctcatggtggggtgtctatctgtagctccgttttggggtgtctggattggtgagtatcctaggtgctgccaatgcctgcttcattctcctgactggttctgtagccctatggtggggtgtctgtagccccattgtggggtgtctgtagatccagcatggggtgtctctgtctgttactccattgtggggtgtctgttcagctcctgggaggtctcagttcgctctttctaactagtaggaagactactggtttgggagacttctcttcaatcaggaagattttgaggaggtttctcatacagaaaataggaggatagtttggaagggatactcttggacttcttggttagggatctgatttggaaggccttctgtccctcttgtctttgcatgtgtttaaatatgtgaaagggatctcagaaggggttgctgatagaagtccagcatgcctaactcagagaaccctccttatttgtctggtcacattcagtgagctctaaagaaggctcaacagtcctgtctctcagggtgactatctgctctttcccttgcccagagacctcattgtgaattaccgttcagaggtcatccgtccccacctggtgtggatcaaagacaacagggaccaagatgaaaaattttgagctttgccaggctgatattgggtgcggaaagaggtgactaatgtctgttttgttatgtgtattttgctgggttggaaaatgttaattcagttccccatgcagcccgttgggcagaatcttgcaaattaagaatcttgtttatggttccataaaatggtaaagggtgattttatcttgtaaagtggcttaaaccccacagctatagcacaagcaagcagggtcgtaagacgccactccgttcttctggaagctgcagagaaagggaacccagaaacctggcatcccagcaataagggtaagaaattcttatcagtcaagtttctggtctctctctctctctctctctttctctgcattgttaaatagtaaactatttgtctcctctgcaagggtttggttaatagaaagaaggatttgtgagactaatcttagcacatctgatgtagtttgtgctaagaatttgtctttctgtgttatgtaatggagagagggatatcacgtgatagaacgtgggttaggacacccataagtctgcttttcaagtcagcttgggaggctggtcagctacaaactttgctacaggtccctgaaaccaatactctatgaaatttctctgtcttgttttgtgtccttaagagcttaaccttgtgaccatgtggggatactttcttttggtttctaccatccagaggacaggaattttggggttcatgtcatagttactcctaagatttttcttgagcagttaaaagccttgcaagcctgaaactggcttctctaggctccttctgggaaaagcagtagaaatttctcaacgctgtatatagctcagtagctaaggctttgtcttttgacagtggtggcctgggttcaattgttggcttctggaatgattcctttctgatttgttatttgtgtagctttgccatttattaagtttcttttctgatttcctctcttgaattttcctttctctggactaccttgtggagattctaaatcttgtaaaaagaaacttcttactatgtctttgcagcacctaggaggtttcctttggtaaagttcagaagctaaaaatattgtccacttggcatggctaaaattaggtaataagagatctaaaagaatttcttttttaaagagcactatggttaaaagtcagcttaattaagagtggataaacaagctatagatatatttaaaaggcctttatgtttttctcttcttggaacttgtttttttggaaaaagttttttcttctcagccgactgaattatttttctccatttttttctcttttttaatttttttgtcttgccactcttaacgcacacgtgagtccctaagataacttctggtagcctgggactcattgggaaaaacagaggaggcaccacagaacccgttttagggaaaaaaaaaaaaaactgttttccacatgaaaccccaggaattaaaaacagatggatccctctcaaaatcaaagactctgctctgtttttcattgtgttatctgatggttttgagttttggggatatcagaaattacttcacattatgagggagctttagtgtgtaataactagataggaaatatactttaagggatggctaatggtagttatacagggatacttgactctttgcacacttggatccagagaagcatgcttttggtcacccggaagataaggaaacattcctcaccctccactgggagatcagactcccatgaaggacgggctgattacaaaatgggctgattgactttgggttgccttgcaatgaaatgcagggtatggccgggtgccgtggctcgtgcttgtaatccaagcactttgggaggctgcactttgggaggccgaggagggcggatcacttgaggtcagcagtttgagaccagcctggccaacatggtgaaaccccgtctctaagaaaaatacaaaaattagccaggcgtggtggcacatgcctgtaatcccagctacttgagaggctaaggcaggagaatcccttgaacccaggaggcggaggttgcagtgagctgagatagcaccactgcactccagcctgggtgacagagcgagactccgtcttaaaaagaaagaaagaaacaaaaataagaaaagaaatgtagggtagaagcactgtactgtcttctcccgtagtatttctctccttttgggttgcagtataaaatggtgcccttaatttgggagttctgtctttgccttcagctgtgattaagccttagaaatgcatactttcctggccctgttcctccaaaggctccaccctgaagccagtaatctgattaagaaactggcaaataaaaagtcttatcagtgccaaatcttctgtctgtatttacatgtgtttttgtgtgtgtgtgtgtgtgtgtgtgtgtgtgtgtgatgtttataaaagagctctgattaattggcttggaaaataagtgcttaaataaaaaaatattttgtcagaaaaatagaaactttgatgactttttgttcacatgactttagtaatcttttggcaataaagacaattttaaagattattgttaaagtaaaatatcttgaaaatgtagacatttggtctaaattaaggtcagctatcagatttgctaaattctttaaggtcaaactgtttccttgactttggaaaattgttcaatttatttactttggagcattatattatagatgaggcctggggacacgtggagagctatgcccctagctatgctgaaaagagtcagaccttatcttcacttctgtctgatgtcctaggctccatccctagcatataattaaaatagcttttttatcaggtttttcactaaaaatcaaagttgctaagagttaacattgtaacatgaaatcgaggttactggagaaacagttttacatacaaggtgtgtagggaatgtgtttttggtgaaagataataaggcataggaatatggcttttgttgaagagaatgtaattttgtctagttcagaggttttaaagactgtcttaaactaaaagagtaacggaacgaaactgagggtttaagcaaagtgaaaagggtttatacagggttgatcctgaaaaaaaaaattctgtgggtataaacaagttggctaagatttgaaaaaggttatttagctttttctataggttaaaatattaaagtcatactgtggggccagaatctgggcccatgtgtccaaataacagggtcttcttagaaaattgatctgctgtttaatggaaaattataaagcgttctaaaaagtttatgagaatgtcaccttgtggtcaaactaattaaaactggatagatacataaaattttatttaaaaactagctttagcattaaagatgcactaatgcgaacatgaaatttggttttctcttttgaagacgatttttttgtaacgttaaaagataatgaaagggtttggctttctcctttgggtaaatggcaggggaaaaggggagagagaagagacaaattcagttatcctcatgctgtctttattgggtcttgtttggaaagctaagtctcctctgtcagaataaaggtttttcttttaagattttggagttatcgttttggtcaaatgaatgacttatggtgacctgggattctattttgtgatatccagtgttttaaacctttgatatttggcaaactttccaaaatcaaattataaattatgtctctttctggcctaatcttttagatattaggtcctctaaagtccaaaaatgacatttggcgtattttgcataaaaatcatacaggaaacattgtcaaatatgaaatggtgtttggctttttgggggctatatttgtgtaaatatatgattgacatatgttctgagattatgtaaaactcctataattctaatatgacttagtatatgttatcagtaataattgtaattatgttaaatggctatgtgccacagaggtaacaaatttccttgtcgattgtgtctttaactctggctactctacaatgtttgtgtcgtccacaggcaattgttgtctcatttttgtcctcttaaaagatggttttataggccgggcatggtggctcatgcctgtaatcccagcacgttaggaggccgaggtgggcagatcacctgaggtcgggagttcaagaccagcctgaccaacatggagaaaccccatctctactaaaaatacaaaatcattcctgtaatcccagctactcgggagaccgaggcaggagaatcgcttgaacctaggaggcggaggttgcggtgagccaagatcatgccattgcactccagcctgggcaacaagagagaaactctgtctcaaaaaaaaatggttttaataccagctgtaaaatgtaacaggtggtcttaaatgcaggtttctgattaataactctggagattgtgacgttagaatagaaggaaaactttcaaatagaagagtgaatggtgtttggttttctttggactgtatttgtataaatatgttattagtgtgtgttccaaaaattatgggaaacttctataattctgatatgatttcactattaataattataattgttatgtaaaattgttgtgtgccacggaagtaaccaaaattcctagtcaattgtagctttaataatggctgtagacttttgtcatccacagacattttatcttgctttggtccttttcaaaaggcagtttataatcggatataatactctgagtgcaggtcttagataactttaaaaattatgctcttggaatagagggaaaaaacatctaaatgtggcaaactgatgtgttaaacattgctaatccttttgttttcagagtcaacataacttatttctttagagctatttgccacttttaccgagtgagtaaaatacactcagtgacaaattttggagcaaatttgtttctctctacctgatttctctagaatttggaaaccatttgtgagtattctcaatttatgacagtatagttaattgcatacgtgcaataagaatctgttttcttttgtaacaggacaccattggagaaattggtcattttaccaaggctttgactggaatggcatgcttcctttaaagaatcaaagttgacttatagagccatttaaagcccgttggggaatctggcctcataccttgtccacacagagtccctgtacaaggttcctgacctgtggtaagtaaagaatgtcactttctaacaggcccaggaaccccaagttatcttgggacctcaagaggagaggactttggtcaactcataggtatttgagggtacaaacccatggctgggctcggctttcaaaaagtcttatctgagattcttcatggaacagagttccatcaaagccaatttaaaaagcctaagtgaaaaataattattcttgctgcacttcatgcaaataatcaggccaagtacagtaagactaaaatgcattttataagcaaatcatttctatcatgatttgtttttaataaaaatggggactgaacagagaaatattatgcttcaaaagaaaatctatagtaaactattagctattcttgaggttaattcttcagtttagactaaattctaaattgtttgtgggttagaagttcccaaactaatgatttcaaatgtttgcttttaaaattgggaattgtacttctcatcctaggactcattataccttatagtaggctattcacataaacactgtagtaaaactatagatgagagtaataatgtttctgccacgcaagccttggaagcccaattaggcctgcatgaatccactcaaacagttgcaaagcagttccactcttctcaccttggagttcgttcccattcccgctacttcccccatcagcaggaagaagccagagcgatcgacggccttttcccatctttatagcctataccttagggttaaagtgttagaaaacccaaaggaagggattgaaaccacctttgcaaaattaggtctgagacagtgaaaacaatctaacttaactgactccatcttgcttctaacctccaagctgtcttcgttcattcctgggcataggctgaactaactttgggagaaacttagtttacagtttaaagatggtaacagccctttcccagagcaaaattccttcttgcctgggacttgcgtttgtaggactaacatcagccacagtgttagaaattatggtttaggagtcatgcagctggaggcaacaagattctgacccccaccaaactgctcctaagatcagtgcttgagatattttgcagaccctgcacttgatggatcagctggcaccacccagatcaataaactggctcatctgatcttgtggcctccacccaggaactgactcagcgcaagaagacagctccgactccctgtgatttcatctctgaccagtcagcactcctggctcactggcttccccccacccaccaagttatccttaaaaactctgctccccgaatgcttggggagactgatttgagtaataataaaacttcggtctcccgcacagctggctctgagggagttactctttctctattgcaattcccctgtcttgatgaatcggctctgtccaggcagcaggcgagttgaacctcttgggcggtcacagttttgacctagtaaagctttcattttcttgctttgccctatggcctaatttataatatacataaccaaaagccttagcttctagtaaatagtatttattaaagtgctatataaacgttacattttagggtaaccaacttttcttgttttatttttgtttgtttttgtttttcaggaatttctcagttttaaaatttaaagtcccatatcccacaaacctgcttagcccccaggcacaccagacactcgatcaccctaaagttctagtttattttgggatccttgcatcccttaaaattacatacaagatgttgggtatacatacatactgcaattgccatcaggttcaccttgcccactctctagacagagttgatttatcaagacagggaaattgcaatagagaaagagtaattcatgcagagcaggctgtatgggagactggagttttattattactcaaatcagtctccctgagcatttggggaccagggtttttaaggacaatttggtgggtggggagcagccagtggtcagaagtaatgattggttggatcagagatgaaatcatagggagtcaaagctgtcttgccctgagtcagttcctgagtggggggtcataggatgagatgagccagtttattgatctgtgtggtaccagttgatccatcgagtgcagggtctgcaaaacgtctcaagcactgatcttaggctttacaatggtgactttatgcccaggagcaatttggggagaagcagtatcttgtagtctctagctgcatgactactaaaccgtaatttctaatcttttggctattttgttagtcctacaaaggcagtctagtccccaggcaagaaggaggttggttttggggaagggttgtcattgcctttgttttaaaccataagctataaactaagttcctcccaaagttatttcagcttacccccaggaatgagcaaggacagcctggggcttagatgcaagagggagttggttacatcagatctctttcactatttcagttataattttgcaatggtggtttcaatacctgaatgcattttcgtaagacaaagcttcaatgccaaaacatctaagatatcccaatacggtattaattcatttgctcggtattaattcatttgctgttgctataaaacagaatacctgaaactaggttacttatttcaaaaaggaacttatttcttacagttatggaggctcagaatgtatctgcacaataggttcttctttcctgctgcccaggtagagctgatttatcaagacaagggaattgcaatggagagttttatacatgtacagccaccagctaagcagaagatcagagttttactattactcaaatcagtctcctcaagaagtctgaggctagggttttcaagatcggtttggggaaaggcatgtggaaagctacgcaataggtgcttgctgctgactggtagggattgcaatcataggactgtgggcaagggtcctcctgtgcactgagtctcttctgggcggggccacaggagcagttggcaggtgcaggtggagccatcagtcatcagacatgaaatatatctgaacagatatctcaaaaggccaatcttaagttctacaatagtgatgttgtctgcaagagtagttggggaagtcgcgtgtcttgtgacctctggaataatggctggcaatcctgtatgtctacaccgcagcagaatttagtttcccctatcctcctagcctggtggtctctcattagctctacaaacgcggttgagttttggggaagggctattgtcatttaaactataaatgtctcccaaagttagcttggcataagcccaggaataattaagagcagcttgaaggctaaaggcaagagaggagttggctagattagatccctttcacttccatcattttctcaccgttataatttttgcaaagaccatttcaagaagtcccaggtcaaaaggacacatctggtgagggccttcttgctggtgggaactctctacagggtcccaatggcctggggcatcacatggcaggagggctgtgtatgctaacttgctagctcaggtctctcttcttatcaagccaccagtgccattcccatgataatgcattaatccattaactcattaatccattagggcagaactttcatgatccaagtgcctcttaaaggcctcccctctcaatactgccacactgggggttaaattttggaggggataaatagtgaaaccatagcaaccactgaatcaaaggagttaaatgctatttttaaaaatgatgctaaaagacaaaaaaaaaaaatatagtgttaaaagaaaaacttgagccaaattaaagttaaaggagtttaattgagcaatgaacgatttgcgaatcaggcagccctcagaattacagcagattcagagagactccaggggtgccttgtggtcagaataaatttatagacaaaaaaaagtaaagtgacatgtagaaatcggaagtgagatgcagaaacagctggattggttacagctcgctgtttgccttatttgaacacagtttgaacaatcagcagtgtataactggctgaagaatggcggctgggattggccaagactgagtgattgtcacaggcccatactcctaagttagtttttcaatcttgtctacctattgagataggttgtagttcatccacagggactcaaatatagaagtacggagtccttctcaggccgtatttagtttgctttaacaatagactttatgggaaaatggtattttgttaaatgcaaaataataagttagagaaacactttagtgtttataatttttaatattgactgttagccttagctgtttatttatttatttatttatttatttatttatttatttatttgagacagagttttgctctcgttgtccaggatggagtgcggtgatgcgatctcggctcactgcaacctccgcctgccaggttcaagtgattctcctgcctcagcctctcgagtagctaggattacgggcacccgccaccaagcccggctaattttttgtgtttttagtagagacggggtttcaccacattggccaggctggtctcgaactcctgacctcaggtgacccacccacctcagcctcccaaagtgctgggattacaggcatgagccaccacgcccacctgccttagctgtttaatatgtaactcatggcttggtatagttcctgagatttggagaggcaaactgaggtttgaatcctgtcttcaaacttattggcagttgggcctgatcaagttgcttaacatttttgtgactcattctccttacatacaaagtggagaaattttgcctatttttaaatagaattgtacaggacagagaaaaatgtattttaagcctcttagtgctttgtgatatatagcaggcaatatttaaatggtaactattattattgataatagtaagtatgtatttatgtgcttcacagttttacaattaaacatgtccctctcagggtttcttactatattcttacctagagctgtgacatattaaaccaccttgcaccaaaactgaacaattggtatactgaggataaacattacttttttattcagtagatatcactggataattttgttataaatctctgacagtaaagtgaaagattatgtatatcagttaaaactgataaataacattaaaaagaaatttctgaattgaacatcttttgctctaaattttctggccaaatagggatacctcaaaggaaaatggccggtgaatttgtatacagataattaaatagtagttttagtcagtaaatcaggaggtccaaataataagtagaaccagggacatagcatgatggaaattatgctgcccagttttcaaaaacattgatggtaataaacagctgtgtaacataaaagctggtatgagaacttggtcaaattctttttacctgagttgagaaaaggtatcatctccccatattctactccaaactgatgaaatgctcaccgagctgctccgtagcctggctggttacctcactgaaatttcacccttggaggccttatgaccttttaacttattccacagctagattccaccattatccaaatcaatggtgcatttacaggtgattcagaagttatttagagaagattctgacatgttcaataaaaattccaaatttctcaggaattacttttagacatctctaaatgaataacagagaggttatgtgaaatccttgtgtaattatctgtgcccagatttttttgtcgttgtttgtttttggtttttgaaacagagtttcactcttatcgcccaggctggagtgcagtggtgcgatcgtggctcactgcaacctccatctcccaggttcaaatgattctcctacctcagcctcccgagtagctaggattacaggtgcctgcgaccacacctggctaatttttgtatttttagtagagaaggggtttcactatgctgaccaggctagtcttaaactcctgacctcaggtgatccgcctgccttggcctcccaaagtgctgggattacaggcgtgagccaccgcgctgggcctgtgaccagatttcttaaccatcacatgcctttggacttgccattcaatgttccatttagtagattttgatacattgaaaaatcactatgaacacattttcaagtctagctggcttcatttttgtcctctaaatggcactaaatagaatctgtgattgtgacagtgcctttgctttaatctaccagctatttttgaaagatatataacttaattgaaaaatagtacaatcttttcacttagaatctttacgaaaaatgtaaaagatgctttgccagtctgaatagttaattgagtttgactgtaccgggtaagatgcaaaagagtgtgtctatggcaactctttatctcataaaaaatttaaagggcctttatttaatgtgactccttttaaaattcatttaatggcgtaagtaaaactggatatataattagagtctaagataaaagcataataattgaaataagataatatgaagaagctcacacaacaatgattgggcttcaaatgaatatattctttaagctcagctgaactcttgtaagttgtattttttcactatgatgtaataataatggtatgtggatgacaattatactactttataaatgtaaggtgtcttatagtgtactaggatctttcctatgcattatcaaatctgaatctccaattagccctggatatttgtatatccttttttttttttttttttttaatcaggacagagtctcactctgttgcccaggctggagtgaagtggcgtgatctcagctcactgcaaccactgcctcccagatagctgggactacaggcatgtgccaccacacttggctaatttttgtatttttagtggaaacggggtttcaccatgttggccaggcttgttttgaactcctggcctcaagtcatctgccacctcggcctcccaaagtgctgggattacaggtgtgagccaccaagtccggcctgtatgtccattttttagaaaaggaaactgagcacaaagaggttgagtaacttgttcaagatcacataattagtaagtgataaagtcacactcaaacccaggtattctaacttcaagtataatgttcttttctctgtgttccttctttgtataatagagagcaatgagtatgtaggaagggcagaatagctgcacagatctttacaatatgtctcacaataatgctgtgctttcaaaagacttgatttaatcattttgtttcctcattcactggtctattcattcaggctaagggggcccttttttctagatagatttgctttcaccatttcattcccttgtcaatattcgccatcttagaataattgtgttttcattctcccgcttgaaaaaagatgcttaggtaattctttatttaagaagtaaagaaacattatcaatattgatatagatatgaacatatatatatatatatatatatatatatatatatatagagagagagagagagagagagagagagagagagatggatagatacagatatagatacctcaaatccaggaagaaggaactagattttttaattatacaaaaataaaatactcttttttaatttttttcttttaccttttgtgttctttacataagatcaaatgaataaatacatttatttaataaggaagcttattggtagttcctgtagtatttactgtctattaagcatcaacctaggaattgtaccataacttttgtttaaatacaattcttctattgatgcagtaagagctgtcagtcatagtgctgggaatgccagaggggaagtcatccctgacaacattttttattgcactattaatacgtacaagttgacgttcaagtgtgtgtatgtatgtgtgcgtgtacataggcacacagaaacatcatatatacatgtgactacgtaaaaaaatacacttaaacatatctgtttactctgtaagtgaataatcatttatttcaatgtttagatgagattttaacatattagaatggcttcatttttctttctaggcaatctgctagcaggctttttccagcaacctattcttcccccatctttttgatattataccaagatttctgcctccatttttgttgatgtaattatcccggcataattttgaaaaaagatttcctggcaatgtaaatccacaagattgttgatatggcttgagctcaaatgatgcttctatccgatttgtttacctttcagcttgagcagagttcttgtttcataagaaaaacaggaagagatactatagtagagaaggacttttatggatggttttattttaagtaaatattgcctgtaagggatccaggaattttagtgtttttcttggattccttaaccataatacttagcccagagcaaaactttctctcaaatgatggtaaaaaatctaattctattaaatcctgattattctgtgagctaccttggaatacattgcctatgagtttttctgctaagaaatggacttcgtttattgctcattttcccaaaatcaaggaatgctgttgttcttcaatttagatagatgttgacaaggtcctcttcatagcagcaggtgttaggctataattgctcattatagaattatgttttgcttgaaggaactcaggaaacaagaaaagcatgttttctgtgtatatgaattctggttgaaaaattgaaagaatgacactaggaatagtatgtaaattggcagaatttgtcatttcattgtgcaactagtattttaaaaggcaataaatcaacgtgaacatccttgggaaatcagtctccttcttaggcctaacttgcaaagtacccccttaccattgtatttttttaagatagaaattgagattagagcaacacggggagcaaaatattggcagatgaacttgttgaaggagatgaaaaacaagaagctatagaaatagattggccaatagtgctgagcaactactcaactgcaaaaatggcttgcttttccaagcaatgtgtaaagcaattagcaccaacgtttttattagtttacataaaataatattactttgtaaacacctataaacagagattacctagatagcctaagactattattaagtacaataaaacgttactggtttaaagtaataggtatagaactttgtattgtatggtgcacattcacataactagagaggaaatggaggtctacaagtcaaggttgaattacacacttgtaatccatccttaagggaaaaagcttcactgatcaagatggtactttgcacaaccttgccaattgtttcacaaagctgtaatgatgccacaaataatctttcacctcccatacctaagtaaaccatatttgagttattttctctgctccttcctatacctttcctctttggcatcacaaagtcagatttttaacctacaggttgacataagccaaaaatgttggaagattataaactgcctctctttctctcactgtatgtgttgtgtatatgtgtgtgtacacatatataagcacacacatagatagaactcacacggaaacataagcacatatctacgcactgttgttttgctaccatatccagtgataacgtttattttgaattacatgtattttttttctgaatttaagagtgaaatgaaatagagttttgttagatatacagttattacctatataaaaatgattctgtgcatacttccttggcaaagtacaatacctcctccgctgtcactgccaatgcacaggtgttctttctcctggctgttagactcactgggagaacttagaaaaatatttcagccacagctttactctagcctagatcaattaatcactaccttggccttacaatctactaggcagtccttcccaaactctagaatacagcagaatcccctagaatgcttattaaaaatgcagattctaaagccccattctaaatgatattcttctggtaggtctttacaagtcatgtattcctggggtctttctttgagaaacacaactctaaaaggtctttgttattcccattctgggttttgaattctttctcgaaattgtaacaaaatatatgtactgaaatactgttcctctaacaatctgaagaaattttcagcactagcagcacttgttggcactattgttgttattttgtttaatatttaagacaactaaaagttacagtaatttataatgagaatcagtattatggaatcaaccattaacagttcatctcactaaagaatttttatttttattatttatttatttacttacttatttttgagacagagtctggctctgtcgcccaggctggagtgcagtggtgtgatctcggctcactgcaacctccacctctcgggttcaagcgattctcttgcctcagcttcccaagtagctgggattacagctgcccgtcaccacacccggataatttttttttgtatttttagtagagatgggatttcaccatgttggccaggctagtctggaactcctgatctcaggtgatccacccgccttggcctcccaaagtgctgggattacaggcgtgagccaccgctcctggcctcgctaaagaattaacatcatatgttcactagtactgaggttagttcccaaacactgcactaaaaaaatgaatgaaacaaatgaatgaaaatgtgtttccttagccatattctaagaaaatcacctctttgattattgtaattggaaccatctcttctttctttgcctggaatctttgtaacaaggttatcttctttcatgtcccattccaattagtaatcatttatttctattaaggcttttataatcattcggagaatccacactctttgtgtctgcagtcgctgagttcactcattaaatacagaattttcaacaaccctatttccatcttcattgttattaatacttcaaatttgcttctgttcagaaccacgcacttgtaggatcgagtaggtatacgtgttatccgtacacactctgaaaaactccctgcagacacttactgaacaggaattgcttatttaactgtgttttctgtctctttcatacatgttctctctctactgaagtgattgaaggatgacaaaggtccttatgggtgtttgatggcctgtgaatagctgtcggtctacgaattccctgaaaataatttctccacttgtatgaaaataatttactccgtgacttttcatgttgtattgtcaatcttccttctggttgtatcaggcaggagtcattgttttacatttcattctttagggggcctatgcttggatttctcccattgagaaaaaacaaagcataactctgacataatcgttggtgttaatatcatgaaaacctggaaaaactaaaggcaaggcaaaaaatatgcattcttatgcatgctttatgtgcactatgcccgtacataaacctggcagaactttaggcagaattaaaggtttaaatgggcatcatctatcctctataggccttttagtgtgcttcttatgtcctgaggaccataagaagatctaggagctgagtcctacctaccccacattgctggtaccgttgggggctctatgccattctactccagccagcttcctaagattagtctattacttttgtttcctttttttcttttctttttccttccttccttcctttttttttttttttttgacagagtctcactgttttgtccaggctggagtgcagtggtgtgatctcgtctcactgcaacctctgcctcccaggttcaagcgattctcatgcctcaccctcctgagtagctgggattacaggcgcgcaccaccaggcctggctaatttttattttagtagagacgcggtttcatcacattggccaggttggttttgaactcctgacctcaagtgatctgcccgcctcggcctcccaaagtgctaggattataggcatgagccactgcacctggccttattactctcgtttcctagacattattccacccttcctaatacttagctacctacttttgcttccgtttaaccctctgtaacttgttttaaggtggttttttttttttttaaatcctttggctatgtatgttcttataaagcaaaatttagttgtgtcaattcatgaaatcatattagcattcacttagaggagagtgagaaatgtttcctgctcatctatatagcattgcccatttgcacttagttttgatatttgaggcaaatccttcggttttattgtctaaacacacagttgtaattctaaggaattttacaccaggtcgaaggaggtagcattgcccttgcatactattatgtagggcattgtaatatgacatctgtcatatagtgagatgaggatggctacctctttcacttaaaatagctctggccctttatataaccaaagaaaatataactgaaatgcttggcaagaagtaaagttatgaacaatgggcttccagcatttgctgtatgcctgctggcataggaattccaagcatataatgggtgttctttatataatgaaaagccaattgtgagaccggcttataatctttggtgccagtaggcagcatgtacatttcataatttcatcctaatgttttaagtgatacaaaaatgtcctttttatctactaaagtgcttcacatgttaataaatacatgtaaatttctgtaaagtgatattgtcccttaatgaatcaaactgataattgtttctatctcattaaaagtaatctatatttgaaagtgaagaactctacaaataaaaatatttaacatatcaaacatttgaaatttctaggtattgtaagcacaaatatttatggtcatatttggccagaatgttttccttgtaaatagacttggaatttttatatccactattgtgattggctgtaataatttttcaagtactgtatacacaaaattataattacattttatactaactatgggtgggggctgtcaagtgtaggtaaacaccaatttgcctcatcatctcttttgtaaaacctccaaccaccaaacctaatcgagcaagtttatgcctcctctactgcatgttagcactttttccatgttaatgtaatatttgtacacaaacctgtatcatccaacagagcttctgagaagtagagacctttgcttattagactttcagttcttacttcgtagaatggtggttggccattccatacattttattttattttattttattattatttttttctgagatgaagtctctctctgaccccgaggctgaagtgcagtggcgcgatcttggctcactgcaacctccgcctctgaagttcaagcaattctcccacctcagtctcccaagtagctgggactacaggcacttgccaccatgcccggctaatttttgtgtttttagtagagatggggttttgccatgttggccagactggtcttgaactcctgacttcaggtgatccacccacctcagcctcccaaagtgttgggattacaggcatgagccaccgcgtctggccatcaatgcattttaaataaatgaactaaataatgaatatcatttaagtgcaattctgtttacatttgtttacatctatacttattttaatcaagtatattcggtggtgtcaacaatctgtagcttaacaattttaattgaaagactctaattacatatcactatataatagttaaatagttttcttggatgaaacaaaagagagtgagatagagaaagaagtaacaattaaaggatttcattatgtgatagtcttcctgtgtttttttttccttttagaaagttgccgcaataatagaaaatgtttatttctttttcttactagtagaggtggcatttttgctatagagtgagtgcccttagttcttcatttattaacaaatatttcattctatgtataaaaagtataataaaatcatatagacaatgttacatgaaaaatgaacggattgttattacaccaggaaatcactactgtgccctatcaaaatgagtttgaagtatatatgtgcatatatatgtatatatgggcatgaatctaaggcaatcaattatgtctattttcaatgctctgtgaagaaagaaattggttgcctactgtcacattttatcttagtgatactctttcattaaaatgcacacacgaaaaaattaaaaatgtaaaatctgattttctaagtggacttaggaaggtacagggaacaagtgctagtgcgtgaagtggaaagtatgagagtacatgaagttgaaaatgtgtttgtgtgtgtgtgtattgtagcaggtcatctaggactgcaattttcaaccatatgcccaagccccggcatagagatagtgattcagttggtctggggtggggtatgggcttaggtaatattttatggctctctaggtggttctgatgtgtagtaggggcaaagaactgcctctatgggtgtctaggactgtactgtaactatcagcaattagtgagagggttctttgtaatgcctttgattattcttctagagacatatgttctgtacatcagccggggagcaaaaccagggaattccagaagtggttctcccttaagacttactctgacggtgttagtgttttcataactcgagccttaccctcattctaggaaaaattataattattatctatcttactttccaccctcagtacttaacattttaagggatttagtgaatttttccacttccctttttatatttgttgcaggtaagtcctgttgaatatcatcctcaaatacatgcatattttactgccatggtaacattttctactttttcttctatttttttcatatgtaaattatcattgaaaatttggcagagtctctggtaaccaaagtaatcttgtctgtttctgtgctactagttttattataatttgattcctgttccaaaaatgaagtacagtaataataattttttaaaactcaaattatttgtaggtcaatattaatgactttttattaatgtatatgtatataggtttaacaataagtgaagcagcttataacagtatatattctattaagtagaaatttacacataaagttagaagaactccatgtgcagtgtcctcttatgctcatatataactttctgtttcaaataagagtttcaaaactagagtctgtgtggcacagatggtgaattgatgccataatttccaatctgcttgttagtagagatatgtcatatgtttattgatgattgcaagtatgtttggtgcattaaagcttcatatttagtattataaaaaacttaatgtcatgtggggaaagaagttgctacctttctaaaaattgtagaatagccaggctcaatggcgcacgcctgttatcccagcactttgggaggccgaggcgggtggatcaccggaggccaggagttcaagaccagcctggccaacgtggtgaaaccccatctctactaaaaatacaaaaaccagccaggcgtagtggcgcacgcctgtgatcccagctactcgggaggctgaggcaggagaattgcttgaactcgggaggtggaggttgcagtgagccaagatcacaccactgcactccagcctgggcaacagaacgagactccatctttcaaaaataaatagataaataaataaaaacaaaaattgtagaataaactccttgaattccaggaagaaacaaatattgttgtccagttatgcaattatgcataatgagagttaaatgcacaaagtgatcttaaatgtacatattcaaaaatagaggttggatcaagaattcagattattcaatatcaattcaattccttctgttgtgccatttgaatcctattgccaaagatgattattcatcttgaaaaacagactcccaaattcagagttcctgcattttaatttgcccttatgaaaggaaggattctttccttttctggaatacaatcaacttctgctgagaagaaggaaagtctttattcaatactgaaaatgtgtattttcttaccgtctatttatatggacaataatcaaacttttaattatcttctcacaatacttacagatctatgagaagagttgctatctaaagctggatctttatggagaagagacatgctcaagtgtagcgaataatttttgttacatatcagtattaactaagctttgcaaagtgaatagggaaacttatatttaaaatgtcagggaaaaaaagagttttaagtaaaagggacacctggaactctaaagagactatagctctaaacctgtagctgaattctgccttagatttcgttgacccttaactaggggcaaatgcacaccccattctcagggtttcccacacacctctggaaggaacacaggagcgtatttacagctatcgtctaaccattatagaattcctggggacaaagttgtgtcagccacctttgatttgtagtaaacaggtacaaaaccgcatcatggaattatttctgcttatataatcctcttctgcagtgtctgaatcttggcacctcctctccttcctcctaaccactgcaaaaacaacacccagattaaggcatcggggagaactgaatatctgaatatcaagtactccatatatattgatccatcgaatatgcctacaatatcactactaacctacaagtgtaccaggagttacacctgcagtataacagattaaaacagccttctccaaagctcatcactttgaatgttaaaagattcattttccaccacttaaaatctgcatactatgatctgtgtataaaaagctaaaagatatatccaatttcaaatgtaatgtcatgcaagtgtctactgaatgtgtatatatctttgtaagtgtccctgagcaaaataactttcaacttaacattctttttctcttggatataaaagagaataacgtaacaagagcaaatttgcttttaaatttctgccttgatagcaagttaaagtatttagaaccaacatcctcttaaatgtataatttatataacggatgagtctagaacagcatttccaaatggaaattgtaaagaacattgatcccgtaagatgttgaatgaaaaacaaattgttaaaatgtgataatttcatttccttctttagcgagtcacaactcaaccctgaaatgttttgtagttaaaaaaattgtttaacttagtttaacccaatgtttctgaacctacgtcacaaaggaaatgtttttgtcaagtgatacataactttcaaagagattggatttttttttttttttttttgaaatgaagtttcactcttattgcccaggctggaatgcagtggcatgatcttggctcactgcaacctctgcctcccaggttcaagcgattctcctgcttcagcctcccggttagctgggattacaagtgcatgccaccacgcccggctaattttttttgtatttttagtagagaaaggggtttcactatgttggtcaggctggtctcgaactctagacctcaggtgatccacctgcctctgcctcctaaagtgcagcgattacaggcgtgagccaccacgcctggtcgagactggaattttttgaaacacattttcataaatgaattactggggtactctctgtttattaactatgttagtactgacaaagattatttgctcggccaaaatttattcaggcttcccaaccttctcatagcccagtctgtgcacattctcctaaaatttagttttagcaggccagatcagtttagccagaaaacactcatccttggtatttgattatcctggatatctgatcatgttcctcatcatccaccatcctccaggggatgactggactattttcagcaggagtctcccttacccatgatgcttcctcttaataattttccatccactgacccctaccctgttccttggttataaaattcccatttgcctgtgctgtattcaaattgagctcaatctctctcccctactgcaagaccctattttcacggtccctatacctattgagatggtcttgaataaagcctgccttaccgtgattcagcaagtgacattgaataattttttctttaacagtataaggatcgcacattaccatttgttttgaaagatggtataaaaagactaactgaaaactaatcttggctgggtatcactggcagaaattcttggtcttcaatctatgtagaacagatatttgcattttcttttgaaaatttaatacattgattaaattgtcattttgttataaaaatatgaaatgaagggtacatatgatttttaaaaatttctgtccaccatcaccaaccactatgtgaaaatacacctttgtaagactttttctattctataacataccttcaaaaccaagaagaagtatttgtaggaaattcattgcttttatttgtgaattgataaagggaaaataataagctagggctcgagcttcagaacagggtgatggttttatatctctctcaaaagtactgcaaggtaggttgtttcaatactattaacaaccccagggttccctgacatcttctattcccagcttccattctcaaaaattatatcgaggccatgagttggactcctcagccctagcaaaagattattcatttgctctgtaacccttcttgaaccccttttcctggtagctgtgcccaataaatccgacttatatatctttgggagttggagagagagagagagagagagaaagaaagtgagacagagagagatagagggaaattattttagctaagaaaatttacagtcacaataatatgagagtctctgaataagggataaaagaatattagacgagacatagtctctgccaatggtgattaagtaaacatagtcaaggagaatatggctgtgaccattagtgtgtaagtggttacatctggtgggcaatctccagtcataagtaaaataatctacgagtgagatacaggctaagcaaagatttcataattaggaccgaacaagcactaagtacaaagtcaaacactgataaattgagcttcattaaaactaagaattctatctattataatacactaataacagtgaaaagaaaagtcatggactgggagaaaaatattcacaagacgtatatctgattagaaaacttgtatccataatatataataaactcatacatatcaataaaaagacaacccattttttaaaagttggcaaaatatttgaacaggcacttcataaaagaggacaaagatggtaaaaaacatttgaataggtgcctaacttcattagtaatcaaagaattttgaatacccctatatatgcatccgaatggttaaaatataataagacaatatcaagtattggggagaattggtgcctcagctggagctctcaaatattgctggtttaagtgtaaattaatatttgccaatatctactaaatctaaatttatgccttccttatgagccagcaattcctctcatatgtatgtgttcaaaagaaattagtaggccaggtgtagtggatcatgcctgtaatcccagcactttgggaggccaaagtgggagggtcacttgaagccaggagttttagactatcctgggcaacatagtttgacctcatctctacaaaaaaaaaaaataaaataataataatcaaaattagcctgacatggtggcatgcacctgtagtcccagctactccagaggctgagatgagagaatggcttgagcccaggaagttgaggctgcagggagccgtgattgcaccactacactcctgcctgggacagagtcagaccctgtctcaaaaaaggggagaaattaagtccaccaaaatagcatgcacaaggtagttaatagcaacattttgcataatagcagaacctgatataacttgtgtccctcagaattagaattaaaaatgcggtatagactgggcgaggtggctcacgcctgtaatcctagcactttgggaggcccaggagggcggatcacttgagatcaggagtcagagaccagcctggtcaacatagtgaaaccctgtctctactaaaaatacaaaaaattagccgtgtgtggtggcaggcgcctgtaatcccagctactcaggaggctaaggcaggagaatcgcttgaacccaggaggcagaggttgtagtgagctgagatcatgccactgcacttcagcctgggtgacagagcgagactttgtctcaaaaacaaaaacaaaaaacaaacaaaaaacaaaaattgggtatatccgtggaatattatatagtaataaaaacctgctacttggaagaatatgaacgaacttcataaacacaatgttgactagaagatgaacatttactgtgtgattccatctatatgaagtttgagaactggccaaagttatctataatgattcaggtcagcagagcagtttcttcctgagaggctggtgggaatatagtgtgaattgggaaagagcatgaaggagacttacagggtgctgcaattgttcagaactctttttccttgatacttgcttacagaaatgtgcagaatttttatttcacctagttttctatgcatgcgtagaatctccatagaacacacattttattaagtacgcattcaacttcttctaaaatacctctagtcatagaaaatgtaactttatttctttattccttactttgcctagcccaagctcctacaaaaaaaaagattagttaccatttaattcaaattataaaacagaaccagtcttttaaacagtatcggatacacaagtatctaatctaacttccattgcctatcagtggatgtggctttaatcaagtcttttctaaacaagatggacaggcactgaagaaaaaaaaagtgagccattttatgtgttttaaaatgataatgtgattttgaattttgctattgtagaagctcctaacaatattatctggcatttgttctatctgaataaagccatggcttatattatgtatatatggaatttcccagaatactattgttagacacatcactgagctgtgaaaaaaaaaatcatctctaatttgatcaatatgtacttacacgtatatcattagttgccattgctctcagcctttagtacattttttatgagccccgtgggccatgagcttgctttttcataacagagaacgagaaagaagaaatctcatcagtataataatacccacatcagtagagggcatggttcagaggcaatcttgttgtctgtcacagactccatgatataagctagaaatgataaagagattcgttacaggatactgtaaaagggatattatggtatataaactcattaagtgttaactagatcaaagcaaatatggcagaaaagagtctctgaatactgtagcagagtttattgaatgaatgaacgaacgaatgaatgaatgaatttataaaaagcgcaggggggccggggcgcggtggctcacacctgtaatcccagcactttgggaggctgaggcagacggatcatctgaggtcaggagttagagaccagcctggcaaacatggtaaaaccccgtctctactaaaaatacaaaaaattagccgggcatggtggcgcatgcctgtagtcccagctacttgggaggctgaggcaggagaatcgcttgaaccctggagacagtggttgcagtgagccgagatcgtgccactacactccagcctgggcaaagagagcaaaactccgtctcgaaaagaaaagaaaaaagaaaagaaaaagaaaaaaaaaagagcgcaggggtcagataattgagttagaaggtagaggagtggggatgttaatgcccatgtgagaaaagaggaagaggtattgaaggaatccagcggactttgatgaggaccatgcgggactttctattttcaggaacctaagggaacatcttgctgtaggcagcctggggctgtctccatcaaagaaatgctaatatttacattcattggtttttgttatgtgactgtctatgtgctaaagctgtggttctcaaagtatgtttcagacccgcaatatcacctggaaatttgtaagaaatgtaaattctcgggctgtgcggagacctactagataatgaattctgggagaggtattataagaagttcttcaggggattttgatatagtctctaggttgagagacagtgtagtagacaatacattcattactttatttattcttctccatgattctataaaagagctattgttactgctttgtttacaaatgagaaaactgaggctttgaaagaggctcagtattttgttcaaggtcatatagctggtatccagagatactgggaatagaacccaaatttgtcagactataaaacacggtgctttcagccactcctccagagccagggggataaaaattcattaatttccatgagtatttgtaatagtagcccgcaagtcctggaatacaattataactgctacagcattacctttgaggagaaaatatctcatttccccaattgattgccaaaataaaatgcttaaaatacaaatgtctggttgaagaaaccctttaattttttttcttgcgttcaggcatttgtgtcaggtttaactaatttattttaacttgcaatacagtgttgcctgtagtaacaaataggacattctgctattagtttttaatctcctaccgacttgttattttccactcctgaagctaaacttctttaacaatttctatgctcattgtatctacttccttactcacgtagctacctcaaacaccaataatccggctgcttccacatccttcaactgaaattgattttgtcacggcccaagtcacatcaggcctcatcttaccactctgtagtattgattgttgatcggtccttcctattggaaaaactcttcttccctggcttctaagatattccactattctagttttcctgtctcagggcaactttatcattttcttggagggttgctctcctatcgtaaatctcttttaacgttgagcttcaatcttaatgctcaatcaacatatttttcttgatctcatcaaaatccatagcaataacaactcttaaccatgaccctcagatttttatatccaaccaaaatcattcttttgagctagagacctatccccctgcccatcagttatgctcatgtatgtcacatagttaattcaaaatcagtatatatgagatcaaaaactgccttctaagcaattcttcctccttctctagctcattgaaagacatcatgtgccaaacttctcaggtttgggggtatcattcttgcattctccctcgagatcactgttctaacattaccttggcatcagccatcatgttttgccaggattgttgcagttcccctaaaacagatgttcaatttcccccacccctgtgattcagttttccacatgcagccagaatgttttaaaaagcatattcgattgtgtcatcttccccctagaaaaccttctgcggtttcttcaaaataaatttaactgaataactagttgacttaattcaatgttttccttcgtcacactaattaatcagtattttcatggtcctcgatgctgagggcttaacattcaagaataaatttgtcttatgtttactttaacttataaacttcctttaaatgaaaactaattgttaaatgatttgcaaaataaccagaggcacaaagtctattgtgatcagtggatatgacagaatatattttttgttgttataccatcactttcacaaaactatggaatatatatataggcatataggtgtgtatgtatatatatgtatagatatgtgtatagagacataatttatagaaacattcgtaataaacccctgccaaacatattttgcacgtttgaaatattagttgattggatttgtggtttgtatgtaagttgaacaattaactgatgtgatcattctgtttccatggctgttaccttagtttataccaccttttcacctgagtgattacaatagcctcctgattccttgtctctttatttgccacgttcccttcttcaaacttcccaaatccactttcccaattgttatcaaaaagagttttcctaaaatgtaagtcagataatgctactcattatgccaaattctcattgccccaaaagtgaaatctgaattctataagatgctctaccaatctctccattaattggcctctgcactatctctttacattcaccccttcccacccaccgaacccacccatccctcaagaacgacattgtacgtactaatcatgtcatacaagtcactattctagcttctgttattcttctggaaatgtcatctcccacctcaactttttacccagctaactccagtttatcatttaggtgatgtctcctttttggaacatacctagaattgacgttacaggaggaatatctcttgtgtgtcatctcaacatcccacagtaactatttttttttctttttgttttctttctttcttttctttttttgagatggagtcttgctctgtcacccaggctggagtgcagtggtgtgatctcggctcactgcaacctccgcctcccgagttcaagcgattcttctgtctcagcctcccgagtagctgggactacaggtgcgtgccaccatgcccggctaatttttgtatttttttagtagagacggagtttcaccatattggccaggctggtctcgaactcctgacctcgtgatccgcccgcctcagcctcccaaagttatgggattacaggcatgagccaccgcgcccggcccacagtaactatgttttaacatacatcaaaccactttgcaatttcctgtttacatgtcattatccctcattagtaagcttctaaaaagtatgggcatttatccagttccctatcatctccctagtccccagcacaatgcctgacacttaagtaattacgtgagtaattaaatgagtaattatgacacattcaagcttgttaaactctaaaacttggaaataaggcaaaagaacaagtagatgttcttttattatcatactaaaaagtattgtctaaaagatctaccgacagatagtttaatttgttagggacatgcgtctttgtataacttagtactaacttaaaagataatttttttgtgggtacatagtaggtgcatataatttggaagcacatgagatattttgatacagacatacaatgcatagttatcacatcagaataaatggggcatctattaccttaagcatttatcctttgtgttacaaacaatccagttatactcttagttatttaaaaatgtacaagtaagttattattgactatagtcaccctatagtatttactattgattagggcttagattctgagaaattttacataaatgtacacatttttgttcagtagagagacaagtaatatctttctggcaccctcaaaatatataattttattgcactttttgatgttaatctgttttgtttctaacttagcaatcttgttctagcttctttttctttctgtgactatgtgtgttcagtcccttgaattcccctttgaatcagttttaatttgttgcctgttttgttattagttagttgaataaatgtttccatattatcaggatatgtttataagggaacagcaaatttacttccgtgtgttttaaactatatgagaaacactgagcttggcatcaatagctaattctaggggagaaaaaaagtcattctcgtatatatttggaaaaacagtttttattcctttttgagatattaacagccatttgtatgttgaagattctgagaaacttggaggtgatttaatctgttttgctttgtttaatctaaaatttcaagattattttggttctaggaaattttgctctagaaaaaacagtttggaaacattggtttacttatagctttaaagaacaatattttaaactacaattcttgtgttcgaaatgctgtaaaaatcatttctattaagatttatttcctctaagtgttttgcattcaaataaggtgaaattctgggtctccaaatatacatttcagaaaagtctttgtttagctgtagggaaggcatcctgacttctcatcattatagtcacatagatacactagatttaaaggatatttaggtcgggcgcggtgactcacacttgtaatcccagcactttgggaggccgaggcgggcagatcacctgaggtcaggagttcgagactggcctggccaacatggtaaaaccccgtctctactaaaaatacaaaaattagctgggcgtggtggcacttgcctgtagtcccaacttcttgggaggctgaggcaggagagttgcttgaacccaggaagcggaggttgcagtgagttgagatcgtgccactgaacttccagcctggggaacagagccggtctccgtctcaaaaaaaaaaaaaaaaaaatagagcgtaattatatattttccttattttaaaagggaaaaaatactttccttattttccatatagagtatatcaaaataattacaatcattaagtaaaactaacatttacctgtggtctaaaaaagtcggttgaggccaggcgcaggggctcactcctgtaatcccagcacttcgggagttagaggccagtggatcacttgaagacaggagtttgagaccagcctagccaacgtgatgaaaccccttctctactaaaaatacaacaattagccaggcgtggtggtgggtgcctctaatcccagctacttaggaggctgaggcagaagaatcgcttggacccaggaggaggaggttgcagtgagccgagattgaaacactgcactccagcctgggcgatagagggagattcagtctcaaaaaaaaaaaaaaaaagaaaagtcagttgagatagtgaagatccaaagatatctgctaaaaaagtgtgtgttatctagttttaaaaagaaatgatatgcaaataaaaacattagtgagcagttaaatatttaaagggtacgttacttacattatgggtgtaaagtgtaagtggatttctgaaaacatgagcaccatgtgaacttcagtatttaaacaagtttattgcttttggcttttggatttattgtttttttgaaaatgggtctgagaacggcctagaagaatgggtagacttgacatctaagtctatctcaattctgctcttgagaaaagaggaagaaattgctcagaatgttctatcataattttcttcttgctctttagatttctaaatggctacacaggtattgagaaacacatttttatcttgttatgaacactaaaattcattagccttatatttcctctttccttatagctgtgtcttgtttttgatggcttaacacttttccattctaatcaagctttgtcatgggctatgggctgaagtgccttgtgatggactgatttactttcagtccctgtaatctgtgcccttgaaggctagaggttgaaatcattaaggctctgctgttgcccttgatctctgctcaaagaggctagagattgattggttgacagtggttgacctggacgtctcaaaatgaagccgtgatgaaggaaaatcaagtacacacgttcagaatatttcataatgacatttattctgcgtgcattttttccagcggtatttttgcttctttttttaaaaaaaatctagtttaatcatttctagcccaccctcaccactaccacatgtttattccatttctacattctggggcacttaagaccttttaattccttgaattagtcatttataaatgttgtctgaatattctatcaaagcaaggcagcatagagaacttattattacacacttatcacatgaaaaaattatttattagcaaatatctattcagagcaaacattttgatcaaagttggcctcaattcactaattagttattatgcaaacataacaaacatccaatagaataaatattcactcttttctacagttttttttggaatggtttcagtgctggaaaaaaaaactaaaccaattcatgtaagaaaaagtaaatgtctgttaagagaaaagaccacttttaaatacacgttttaatatttctattttaatttctacttaaaaaggttaaggaggaatattctaaagacgaatatatttgcaaatactgtgggaacactttattgaaccaatttgagaactaagtcaattatattgaatttacatatttggttaaagaaaaaatgagaagtgattagattagttcaatatttaagtgaacttaacagaagtatccaagttcatgttgaccctattgcttcgtattaatattgataattacaaatatacatatatattaattttcaaaaatatagattatgagtgggtaataatagcttctaaaaattcactttggtactattccatagtggccaagtttccttttgttctctggagggaggtggcctaatttaggcaagtttagtatttagagcaaaaaaaaaggcagtctatgcagagattcaatggcatcttaaacctgccccacctatctctcattttttacattgctttttcattatcttttcctttcctttcgagagacttgaatttaatattgtctctcttttccccatgtttgccttttataaatctaagcatttctgccattaatactgtaggttaagaaagtggcagccaccatatttaaggaatagtaaaatctgtaactggggaaatatacagtcttctgagaaactgaaataaatttcaggtaaaaagtatgtgacgtcaattgagtggtgcacgtcgagggatacaaacctaaatacattccaggatgaaaatcgtgataagtttggagctccattttcagggaagtttctgtactgactttagaaacattgcaaccaaacaaatccttgggaactgtagaaaggactctttttagtgttcaggctaagtagacaatgcctacatatttaaagtttcatttggcagacttgacacagtaggcttcatggaacacaagttatgccttccttggtctgagagagagaagactagttctgctcaactgaagttaagatctgaggttcagtgagtccatatagatatcatggaagattgagtgaatacactggccctaaagcaacagaaagagcacaagttgagatacagttttaatccccaatgattggaatcaccactgccagatatcacatcctaattacacattctgcccttcaagctctggcaatacttttcttgcggtgccccctttctttagtttgccatatgaagagtgtggtaattactttccctgcagttgtttaccagttctcattcatttttcaagttttcctttctctctctctccttttttttttttttttttttttttagatggggagtctcgctctgtcagccaggctggagtgcagtagcatgatctcggctcactgcaacctccacctcccgggttcaagcgattctcctgccctcagcctcccgaatagctaggactacaggtgcatgccaccatgcccagctaatttttcttgtatttttagtagagacgggatttcaccatgttgggcacgctggtcttgaactcctgacctcaggtgatccacccgcctcggcctcccaaagtgctgggattacaagtgtgagccaccgctcccagtcgaatttttctttctctaaacaattttcagtgtaaaggtctgctgtgctataaatttgtgacacatgattgtgttgtagttacgactacgtaaggctctatggacaggtttcctttagttctgccagcacagctaaccagctaatataaatataaagaaatgcaactgttgacaccaaatgcagtttccgtttgcctgaacaatcaacaaataaacacaaaatctgaataaacattacaatgtgaatctatgtgtctgtatccataattatataaaattgaattattctaaagaattctatgtttcttaacaaaaatattatatgcatatatacagttaggtttaatagatttgtataagcatttctaattcttagcttccattgatcttcagtgtttcagaatatttatttcaaatcacttttggaagaaagtaagtttacaaattgtgaaaataatacacaaatcagagatccctatttaaaactaatccctacatcgcttcatcaaaatgcctaaaattcttttttggaatgaaattcacagagaattgcaagattcatttcctttacacttttattcactgccaataacttggggatactaagagtgcaggagaagcaggtaattctgagggcgttttggaggaaagcagttttgcattggctaagtttttaaaaaagattaaacatttaagtgccttgttttaaagatttgaatgataatgatttcaggtaattgatttttaagctatatggtaataataagacaaaaataattcatttgtttccttttggaaaatagattttttaaaagataaagatctgttttaatttttgtttttatttctaaggtactgtccaacctaaaaatatgaaagtaggtgtgcataagcttttttaaaaaaaaatcgccagtagtacaaacaaattttatagtccatcatttgcagggctggagggcttgccatatttaaatgtgtgacctgttttgagtatttgggtcaaagagaagggaggcaccagtgtttaaagtggcacaaacagagggaagaatgaaaatacaatcgaatatattcatttttattttcataaataaaagaaagtttaaaaaatctaggtacatcagtaatgttcccttagatagtattattatgtggctattgtttactctcctttgtcagcaacacgatcagtgattttcagcacctgctattgggttaataatggagttagagaagcatgagtttcaatttgtgctcatctactgcaaagtagctatatgaacttgggcagttacttaacctcgctaagctttgtttcctatccatacaatagggtcaagagaagtacctctcttacaaggtctgtgaaaatgaagtatgttcatgtgtttaaagtgtttagtaggtggcacatagtaagcactcaaattatatggactatggccattaccttgacaaactatattctctctccatttcctcatatgtaatgtggattaacacgaagattaaacttaaaaagtgcataaaaatctcagtgtctagcaatttgtagatgttcaacattattaaaattccctcctcaattttgcttactttgctgtactgaatgctatgtgagataggaaaggatatcaattatttgctatgccccttccgggcactaaataaatacatgtttttgttcattcttttactcaatctaaaagttattgagcaccaaataggcatcaggaagtatatggacaagtataggaaacaggattgatatttacaatcaggagaacaattttgagcccccagtcagtcacttgatgttatcctgggcaatcaatggatagagtccaaccactctaagcctcagttttcttatttctacatgttgatagtattaatagttgttataagatttgaaacctgttatggactatagtattttgtgcagacattagtcaaaatcataaattattttggggagcacatttacattcctcacagtgaagccttgggccctacacctttgcactaaattatacatctgtagcaggaaaaaaaaatttcagtatcacacaaatttaagtgggctaaaaatggtattttattaatttttctatagctaaattaaatttctattttggttcctcttttaatttaacaggtttcttaatataccattctcaggaaatcttaataaaattcagtgacttttcaggtctaccggtcacattcaggagttgttaggactctagcctccactctaggattggaataacacaggagtattacttagcttcatggcatcagggccaacttctgattctaggtcaaggacacacagagatgtgacatccaatgtggtctgtggggaagaagatctttgcatgcaggcattggctgaagtgaaccagtacctgcatcccgcccttagttgaactgcctattctgcctccaggatttggggtgtctgtgtcctgattaccacacccttgaaagactgccagcttgctcctcctaacttccatgaccttctcaagcaccgacacatgttagctgcttatcacaaacctgatgagatgctcagacccctgtgaggctaatctacatgcccagtccctttgctctggttgggcactatttttcagcagctccagaacctccttctcttctttaggactttggttccctaagaggacattataatgttcctcttatttgaaaaggtgtgtgtgtgtgtgtcagagggtcaggaccctccccacacccccacacggcttctagctctcacttatctgtaactctctcaacttccccctcttcttctcttggtaggcacctagagcaggtaaaaacttttaaacaggattcttctatatctgtttatgccagaatcatggttcacttacactaaaagcagttgacctctgtcagtgaaatcaagagttgattttgtaattcaagagctctgtatttataaacaaccctaaggcagtgaggaaacagtgcctaacttaccttacttgcaaaggatggaacttaagaatgtggttacaatctcacgaaatacttgtgtgtgtgtgtgtgtgtgtgtgtacgcacctgtgtgtgtgtagttctgaagatggcattgttaggtggtggaggcctataatattatgattctcaacatgtgaattgttatcacaggcaactaatcctattgcctcaggtttacaatctgtaaatgggaaataaaatgcctaatgtttgttctcagcctagttgtgaggattaaatgcaaaatacagcctcaacaaatgtgagttcccttcctcacattcccttgtaaaaaaaggactttccccaccccccttttatttagcatatcaacaattactcctttatttgggactgaacagccttttactaactatccttttgtttctcattttttatattcatgcatagtacaacttatgaaatattttaccccaaatcctcttgggtctgctttatatgcataaccaaataaggcatatttttatacaactattgtgttttatcttaaggtaaatttcaagctaaagtgaaaaatgaattccttctggtattcaggcagaattttccttacgagaagtaggtcaagaaacattgaacgcagaataaatttatctctgaatacggctcttcagctctggattgtttaaggatggcctagaatctacgctgagcattctcttgcatctcctttttcagtatggttctgaattagcactcgggcataaagcatttccttggaattgctcttatttttgtccccatattctgcactccatcgtcaggtaagaaggcaatatgtagcagtcatttaagaaaccagcacataaattatttccgaagttaaatcaatgtgcatcttactggttcagttcacagttaactagaactgctggggcttgcttttatgaattgtcccattccctccttgctttctttttgagactgactcttgctctgtcacccaggctggagtacagtggtgcgatctcagctcactgcaacctcctcctcccgggttcaagtgattctcctgcctaagcctccctagtagctgggattacaggcatgcaccaccacgcccggctaatttttgtatttttagtagagacggggtttcaccacgttggccaggctggtcttgaactcctgacctcaagtgatccacctgcctcggcttcccaaagtactgggattacaggcatgagccactgcgcctgggctctctcttttaaacaatcataaatatgaaattaaatgggctgactggaagcaaattggtctgtaggaacgcccatgaaagtgttccattctgattgttttcccatcctgcagcccctctggcctagtggaagctcctttcgttttgcagatttagattaactggggtaggtgagagagggcagggatggcaggccatttgtctctcatcaccgactgaaaagttgagcctaatatataccttttgctcctctacccaaatgaattacaaaattctaattccctcacacaccggggcctgttgtggggtggggggaggggggagggatagcattaggagatatacctaatgttaaatgacgagttaatgggtgcagcacaccaacatggcacatgtatacatatgtaataaacctgcacgttgtgcacatgtaccctaaaacctaaagtataataataaaaaaaagagttgattgtttttataatctaaaagtaaagacagtttggttttgtcaaaacttctttgttttctatttattttctctatagcttctaaatttgtgttctgcttgtgcatgcgtgtatgcttgcatgcatatgtgtgtgtgttttccttaaagagtaggcaaaaaagggcagaaaatagatcattcccttataaacctgacaagtacctgtttgtttctttcactgtggtaactggaaggctggaaatactgagcacttcagtagtcattctaaaaagattggttcatgtttaatttgtttgactgcccaaacctctaatggttcagtgaaaccttcgtgaggattttaagaaatagatcaggtgatagtttcagttgaagctactaaaaaaagcctttttgttcatattattttattagagtgggaaattgggaattctaaaatgttcccacatttgtcacccgtgttactctggcagccttttgtcatgttcacattttccctgttcgtttgttactgctgctgaatgtactttaatgattctaataggagctatagattgtgcagaagaataacaagcttcaaattaaaaaagaatatatttgcattttgtggcttctaaatattaatacaattgaattgtttttgttgaccactgtacattgacttcccagggtccggtgcatagcaaattcatagatgctccataaaataattatagaaccatgcattcgtgtgtgctgtgttgtggttctgggtactaaggatgtctgcctgagtcctgaatgagtcttaatctccatccaagttgtgtgtttcagagttgggatggtgcaaggaatttgattattaatgtaaactttagataactcatagcatgaataacaactgtacagtagaagaaaaatgcagaaagaataaaaaacacaaacaacagctaaaacaacaacacataaaaaacctcaaataattagagcaacaggctgtgaatgcatttagcaaacatatacccttcacttacttttgggaatccagtaactttctcctctgagttcaatgaaaaatcagtagcacttacgggtgtgatcattaactttgtttacttttttagctttcaatgacattcacgtttgtgttgagatttgttttttctttcctgaacattttatcccattcgccaatccagaaatgatagaataggaaaagaacaactagggctttatgcaagtacagtaaaatctattgatgcccctctacaaaaggctgcaaattggaatggctgaaatcatctgctcgtcttttgtgttgcattttaggactatcaatgaaacttgaaatgatatattaatagaaagtttgaacaggaattatatattgaaaatgtgacagaatgggtagatccaatcatcctaggctgttgagaagggaatatgcctcacagtcttgtactttttagatgaagccttccaatttacctggcagcccacctcatggctcagtgtttagtcatatagcagaggttgttacaattacaaaagttctcttttttttccatggaaaattgatcatttggagcagtagattaatttatttcaattttaaagtatgagaggcatagaggtacattaaaaagaacaaagactttgtagtcagagacatctaagagttgtgtaaacctgagcacataagtagcattttcttatctatatgatgggatggggttggggtaagaatatatatcatataggcagttacaaatataaaccacacatcacgtatggattttttttttagatgaactcatttatttgacatattaaattagacaaagaaatatatatgtaaccagataaaaacaatcacattctcatactacttgaacacaccgcagtggtcaaaaataatggattgtaaaatggaccccaggatttaatgcaaaaaccaccccatacgagaaaagtttcaggcttctaacttcactgaatccagtactaaacgtgcttctttatattcctcagcttcttccaagtctttttcactttctaatatctgttgaagatccaaatatgcggcttccaacctgcgctggcaatctgggatcatcatccgggattcttgtaggatctctgcctgctttttgatgtcataattttcaccatcttcagctctcattttttcaatcttttcttcttgttgttttgcctctttttcatacatcactttttatttgaccaaccgcttcaccacaccggtcttgatcttgatctgtctcacgcgaggatcggccatggtccctcgagccccgcgagaaggaggggcggaaagccggggtaaccgtggagggcgacgcgcagaggcggtagctatttaggcttggtcgccggcgcgcatgcgcaggctgcgcggccacttaaggagtttttataataaatcattatagtgtcataccttccatcaaaggattgagtactcaggtgtgaacattggtaaacaatttttccaatattaacatctgtagtattttaaattatgtgtcattttaaggtactgttattctctttgtaatttaacattttttataatagaaataattttgcaattgctacattaacattttgagttgattattgcttattgttagcaattccattgcatcattttacagattccatcactgtgctgaaacatcccatctgtttgtgaaagttttggatgttttctttagtatctagatgaatctattccttatcttatcagtcagagatattttaaagtccttgtctgttagttcaagcatataggttatctcttagtctggttatgttgatggctttacttcttgataatgggtgtattttgcttagttttatttattttttgcaagtctcattttctttttagtgaatgttagatgtcatgtatagaagaaaaatagagaatgaggtaaatatgtttaatcttggaaataggtatagctttttttctgtcatactgctagtatggggtttgagtcagtggtgttagtattgagctggtttggaggggcgggggttgttgttgctgtagcaaccttcagaacactacagtcttcaaagacctccactgatgggctgctgctatcccgtgcttaatgtaatagtgtctgcggtcctaaagggatttctatcttcttgttccatcctcagttttcagcaagccttatatgcctgtctctcccctagtggtaacagatcattctgtttttattggtgcagaatcctgggccaaagaggttatcatactgctcttccaaagagggtatcttgaccctctctcagtggcttctaccttccccaacccctctgaacaggcgggtcccatgggtggtagagtttagtatctttccttcagtttagtatctttccttaaatcttacgccttttagaagaggagggtctggaaaatgggtttgacttcatgtttgtgtgtcactgaggggagcttcttcctatctcttgtcctacgccttacttttttgcaagttcccaatagaagtttgtggaaaagaattccagaatgagtgcagactccttcggtctgcatttccaaggatgctgaaatgtcataccagcccacacctgacttttaagaatgccttacaattggagctattttctttttcctgctcctacgatgactacttcttcctccagttccctgccaaaggtaaacctttcatgtatccagtctctccttggaggagattgaagtactttggctcacctcgttgccttgtggccacagctatataaatggctcaaaaaataatacgtttttatagatcaccctgctttttctcattgggtggagcaacgttcttatatagcatttttacatcctaagcagaagaggaacttgattatgatggaaagcgtaagtattttaccctcttgggatatccacattcgacatgttaatcattacagttacccttactttagatggaaacaatgaataatacttatttttattagagaaaggccgtagtagataagtgatattttaaaaattgaatttaataaaaatgtattgaggacctgttatctgtgaatcacccaatgggaaaagtcatgaaaagctgaagaaaacacttcattgtatttcagagcttttaatttaaaggtgaagaaaaaaggtgactcaaaagcattttgtatattcagaatccatttgtgaaacctaatttgtgatgttgaaactgagatttggcacactgtccaaaattgcattcaaaagtgtagaacctgctgtcctggcctttttgttttgtttgtttgtttggtggggtggggtggggtgggcgtaggaaggaaaaagaaaagataaggagtgtggtattgactgatagtttattctcaagtgcagtcaccagggagttcgaactgacttctacttttgaagttgaaacatggaagcagggctccaaaattttgtatctcattgaagtaacttagaatactcacacttttatgaatgattgagatacttcctaaaaatttaaaccatgatatctccaacaacggaaaagagggaatatgaaacccccataggctacgggtgtcaatcaaaatagtcttcggagaaatgaaatgttttcttcatttactataaaattgaagaaaaaatttcatttttcttttttttcttttttgagacgaagcctcgctctgtcacccaggctggagtgcagtgacgcgatcttggctcactgcaacttctgcctcctgggttcatgcgattctcctgcctgagacttgcgagtagctgggattacaggtgcatgccaccatgcccggctaatttttgtgttttttagtagagacggggtttcgccatgttggccaagctggtctcgaactcctgacctcaagtgattcacccacctcagctcctagagtgctgggattacagatgtgagtcaccgtgcccagccaaaaggttcatttctcaagttttacaaaacttttcagtcaaaattcacatatctactgtcacataattcatactcaattacattccttcaaaaatgctctcacacaaagtttgaacacatcgaggcaggtggtttgaaacatccatcccaaagttgagctgggagtcaaggtgacaagaatggcccatgagcagtgagatgtctaccaatgccgggctccggggcaaacaactaacattaagtgcaaaggattaaacttgttaattaggagaaaataaaagcaggcatttgcttattttattattgagtttatattaatagtaatcacttccattcatattagatgcaaaggaacttttaatattctatgcactgacttaaacttatttcttaatccctttcatctccttataatgatgcatatgagattattggaggtttggaggtatgcactaatgcaaagtgatgagctgtaaccaaaaagtaaccaagaaaataaaatcacaatttcatgcatgtatttatatttgtcttctatggcaaaccatggggatattgaaatatgaaatttcaaataccctctttattatgttagatgcattatttttaacaatagaagccttaaataaaatattaagatacatttgtattttgacacttaactgcccttggcattgtgcatttaaacttttggtgtctagcaaagttaaagggagactgtctttaaatacatatatattgatagtgccattttgttagacatgtcatctttcgaatgtaatgatattgttcacacattgattttattgatgatgttaaatcaaaatggtttctgcaattagtaacttctataaaacaaacatattaaaaggaaatcatacttcctattgtagtataccaatttatttttccatttaggaatagctatgctccctctcatgttttgttttgtataccttactaaattaaatattcattttattctttaccagtttccatcacagacacaatcagtattatttaaatttcagcaagaaactaaacaagacttacaagtttttcagtgctaatgatttttttttctcattaagtctgagtctaatgaaactaaacagaaagttctggttggattccttggtcacccctatctgtgtttgtgaattcctataattggcatgaattgaaagttcttgttatcactgatagtaacccagagacaattccaatttgggtttaaatggccctatgcagacaagggtaactgaacaaaccaaaacagcttcatgtgtttatggcagataaataccaattaagtactagaaatgacatcagggttttttttttttcctgtatagtttcaagttaagagactttttctcccttgagtttgcagatatagagcatcatgaccttacaagaggaaggagagcaacttcccatctgaatgagagatggaaaaattatatgaaatagaactaattctactgttaagcagtaaactacttattacttgagtattaattaggacacttggctacaaataacttataccaaatttgaactatctttatcaaatgtggaatttattccaaaggatacgtttattctaaggattaaaatgtttctcaaggcaggttagggcaaattgcagtacacctcagaaaatgcaatcaaaaccttccaggactctctgtcacatctccttctctctaaactatcttttttattgcagattggcttccgctgttcctcatgtagcagaccatgattgccaacattcccttatatttatatctcgcagttgaaggattcagggagagcctgattctaagacccaagtctaaattctttaaatacatacgtatgtatgtgtatatgtatatgtatgtatatatatatatacacacacatgcattcatgtttagatagacatacacagacatatatgtgaattacattgaattacatatgaattacatttctatttaatgtattcaatgtaggttacaatgcaacgttatagaccttttcatccattacaggtaggaatgtggtttaatatggaatttttgagaagtaatttgaaaatatgtaccaaaacttacggagatgatttttcacctaaatccattataatttttgagactcttttctaaggtaataatcccacatttgggtggaggctttatctatattgatagtaattgcaagactattttaatagcaaaaattatgagaccatttttcaaggttccaaaaaaaagcagaacggtaatttttatgggaacaaagaagacaatgcttctagatatttaaattgtgtttgaacaacattggaaaacctgttattttaaatgaagaaagtaaggtgtctaactacttgtgcaatgcaattacaattatgcaaggaaaatgcaaaggaaatatatcaaactttaaatcctaaagcttttaatactcactttttctctagtttctaaaatttggctaataaacataaatttaatttataaattaattgaccttggcattgtataaacatcagggtaaataatgcatctgtctctctgtctctctctcgctctctttattcaactttatcctaaagcatcatactaattacaatctattggttttagtttgactcctcagctaggttactcaaacaatgaaagactacttttaatctctgaagatgtttctttatcttgaattttgatttcctaatcaatgaatacttgtctaaatttagtattaagttcacacacatcttttctcttttttggattactttgccaatcaataatgttcctcttttagcggttactggttatttctactgatctctgctgagagtttattctcagacactttcataccacgctttgaaaatactggtttccaagctgtgaattcactgtatctatgcagaaaggagtgatttgtttcttgtatggcatgatgttttttatatcctgtgaaaaccatcaattccacatttgagtggttccttcatgacatgggctgctctaactaaagaaaaatgtgcattaaaaatatgtgtccgattaaggcattaaaatatcttaagcagtcaggtagcaaacaaatctttctgagttccaattactgtattacattatgtcaatacttactgtcaaagtacattacagaaaaaggctgggctcttttcagaaagggcattgcaatataatgggtgacaagaaactgcatctgtgtatatggaagcacaagaaactaacaacaacaaaaaaatagtgcccaatcctaggtggctgaagagtaatatctaagagaatatgaagaaaacccattatttattccctaggccagataaggagccctggctttctctggcatagctgcagtgtatataattatacctctttcagtgccaattactgtgtgtatatccataaaaagaatggtacaatggtgacagagatgaagagcagatctcttaaataaacatgtaaaaaaaagcaaagtaaagaaaaataataaaaacaggtctattgctgttaatgccactgttccagaaaaaagtaaaacagagatcattaatatccataagagccagaataatgtctatatttttcatccaacatttttcaaaccatggagcccttttagaatctgctgatgactgtggactctcatatatacacactcataaaattttgcccacaattttaggggtttattccatagtcgtattgaaagcccatagatttcaggataggaataacaatgttgattactcatttggggccagacactttctatgccatataaagataatggcttatttagtcctcacaacgacactatgagatagttattattttagtacctattttacagatgagaaaactaaaggaaagaaaagttatgtaaataaattgagaaaactcagccagtaagcggcaaaactggactttaaatccaggccgtatgattccagagcatactccaacaaggactgtaaactgcatcctgcagaaacaaataaacaaacaaaaacctagaataaagaagcagatgatagagttttagaactggcggaacacatagaaattatcttttccaaattctatgttttaaagttgaggaaattgtattccacataattaaatgattaacagaagcccatagagcaagttagtgttagagccagggttcaagtgggaacattcatccaaagctcatgacaaagctacaccgatattattatcattattctacaggtgaggaaacagaggcacactgttaataagtagcagaactacctttcgaacccagataggcaggttcaaagctaaaactaccatattactgtaattcaggaaagccattccctttataattcgtttagtaggcgctcggaatgatcaaatctttaaattagaaaattcgaatgtcttcaatttacaaactttggaaattctggagattctactttacaatcattttaatgttctctaatcaaaaactaatgttttcagtgtgctacaattcatgaattttatattcatatcagaatataaaattatacacatgcatatatgaactttatatgttatatatgtatgaagcttatgtatgtatataacaatatgtatatgaacacaacctgaatacatatgtatatatagataaccattcaaacattttaaattggctatagaggaaagcaatttgccatttgacttaaagtcttttgtaatgactagaatttaaaataaagtttacaatttatgaagatgaaataaaactatacttaaaatgctgtttttcgaaacagaaaattcccttaaaacctcaaaatctattgtttgttttatataataaaaatccaaattttttctacaatgtctaaatcttttgtaattctgttatattttcctctacaagttcaactcagtgatacctaagtgcaaacaataaggctagtatgagagctttttttttttgagacggagtctcgctctgtcgcccaggctggagtgcagtggcgcgatctcggctcactgcaagctccgcctcccgggttcagccattctcctgtctcagcctcccaagtagctgagactacaggtgcccgccaccacgcccggctagtttttttttttttttgtatttttagtagagacggggtttcaccgtgtttgccaggagggtctcgatctcctgaccttgtgatccgcccacctcggcctcccaaagtgccgggattacaggcgtgagccaccgcgcctggccaaaagttacttaatttgcatgccaacctacactcacatctattaaatgattagtcaatcaagatatagacaaaactcatctattggcaatgtacactgagggacgtgttctcggtgtagtcctgtcaccgatcttagtacagaaataaataccttttttaatccagtggcataataaacctgagaaaagagaagtctttcattaagaatcttggaagaagcagtcgttaaccacttgtcatcagtattagcaactcaagctgaataaaaattgattgtgtgactctggaccttctttgctctgccacttggataatctattagcattggcacctgattaactctcaaaactgtctcctcttttgattagctcccaggatttcttttgtattctcagtaataattttccaaacccttttctaaaagactgactctaatgttcttttactgactgcaaagtttcccgtcagtgctgaaaacatgtttggccttcattcctatttataatttttggcttgatctttcataaacactggcttaagacttccgtatttggtgaacagggagtgaatgattactccgaaactttatttctgttttaagtgctttcagtatttggcacaaggtggaaatgagcaggctcagtactgaccattgctattacaataactcactgcatttccttaaaacttattttccacttaaattgttttctacattgatttctgtctgtgctaatacttggccatgtatgagaacaacctgcttgttttaatgtttaaattttgaatggtatggtaaggagaaagaccaagatttaaaagataatatattctgaaagggcaatttttggaaagcttttaatacttcatttaaaacccattcttcagcttattttaaatttaatgatggaatacaaccctctcttttttaaatgaagaggttatatacattccatcattattgaattttattctatgggccacatttactatttacctgctatattagtcagctttattataggctaatgctctgtaaaaaacaaatccaaatctcaatgacttataagaacaaacatttatttcttattcacatgtcaggttcaattttgtattgagtacaggtcagctctatgcatctctccttttaggaacagaggctacctgaggcgtgtacttcccctgacaaagggaggaaggaccaagaaaagtgaaaacactttatgattcttaagcccctagctcagaattgacacactctcatatctgactgtgttccactggtcaaggcaagtcacatgaccaaggccacatcagtgagtgggatgtgtaatccacccatggtgaaccatggcaagtggaaaggaggaagaaaaagaaaccgatgagcaaataatgtaaactaccaacttgttcaagaagttctaatgcaattaaatatatagtcaggaataataatactgatctctattggcacttactttgtactaagtctttgcttaagactactttcgatgctttacaggatacctcatcaaagtgaagctaagagtttttttaccacgattatttcctcttttcagactggaaatcttgggtttggtgtggcttatgagtcttttctttctttgttttgtttgtttgtttgtttgtttttgagatggagtcttgaactcctgtcggggctggagtgcagtggcatgatcttggctcactgcaacctcagcctcccaggttcaagtgattctcctgcgtcagcctcccaagtagctgggatttcaggtgtccgccaccacgcccggctaatctttttatttttagtagagacggggcttcactgcgttgatcaggctggtctcgaactcctgacctcatgctgcgtccacctgggcctcccaaagtgctgggattacagacatgagagactgcacccggcctatgagtcttttctaacactgcataactagtgcatgatcaagccaagaaatgtgggcccaaattccactacagagagcagacaataacgatgctcctatgggccattctggattacatatcccatgcaacaattgaggagccctacagggcatgcttagcaattgttccattgtttttttttttttttgtcctttttaatacatagacttctgtccctcgtttattgagggttgcccctgggagaactaaatctctatcacttctggactgccctgcaaatgggcttaccaagccctcctaaactgaagaaagccttaacacaaagaaacagagagatgtggatgcttgtggtgaggaatcttcagcatccacagaatccgttcactatagttataggtgaactcagggatggctcggtgaaataagggatgaggcattatcctcatctactatgccattttattaacctttactccatagtgtaagttgagtaaatacatcttgtgatttaaatatccccttataatccaggccctgtgtttgaccatttgtctgtttctaaagcatctcattaacagtatgtttggaaatggctgttgtgtgtcgtgcacatttggctgtttgctttccttttggtttgcaaagaagtattttgcaacccataaaaatagataaatatacaccacagaacaatgtatttttttaaattttcaggggagaatttgaatcttttaaaagtaatattgagtaggcagctgtatggaaacaggcatctagttagcagttctgctacaatatccaagtagttaatttcacctctaaattacactggagaccttgaccttattttgatttattctgtcataattagtctatggttattactttaacaaaaataagtcatctttctcatgaacactaccaaagcacatttcaagtctgcatactaattaatagtaacttatttttactcctaacaagtctacacccacatactcatgtttaaacaagatgagatatttgaaatcactttataaattataatgcaccacagaaatatccattatttccattattactaaaaacttacttcattcttttgagcatgaggaggtataatttatgtgaatatcatttcatattttgtttttatctttcaaatcgagaagacttgaattttttgcatatttacaaatactataaaaatcctactaattattaacatggctgccacgtagcaatcgtgtctattttatgaaataatgtcatttatacagaagacccacgggaagttgtaatatatttggaagtaaagatttataggttttgtctatttttttctctttctcagcattaatatgtcatacatgtgtcacatttagtcttcacaattcagtatctttattactattaccatgaaacaaatagaggcaatgagacacagagaggttaagtaacttactcaaggccacagagataatgagatgtgaaactggagttggaactcaggttatttgactctgaaatgagtgtatgatgtaaccccggcctgcattgtatctaacacatgcaattttaagaggataagaattaactgtttgcacaatctaccagatggcactgtttttccaactgagaccacttaacaccttttcatatactcttggagttctgatcattcttccactctaatacatttcttcaatctcattgtcattatgtcctacttcatgcaacttcgattaattcttcacaagtatatttctacaatacttgtgctatgtttccaatgtatagagcattgcaatttttatgaatatacaactatgcgattatgttaggttctcaccataactccaatttgctaatggagcataaattctgtgattaagtggcagggaatgggagagaacttttattcaatatgagctgacatggctttccaatctggtttctgagtccaacaactccctacaataaaaaagcaattgacctacctgagaaagaagtggcgtttgcagtggaggcaaaggaacagacaggtcatccatagcattttacattgtgtcagaagcatgacagtcatgaaagatgaagtaaagggcaattatatcatattacagagtgaaattcacctagagaaataaaggcagattgtttgcaagaaatattctttctcttaattttttattcattgtagtgatgaaaataagtagcaatatttcagttccaaggctaaattttggggagaagtcattgaaagttagttttatgtctaatgggtgctcaatggataatttaggaaatgaattggtgacagaaggtctataattaacagagtagtttgagcagtatgatgaagtgcagggggaaagcattggtctaggacttagtagatctgagatttaattacagtattgattagtcacttgatttattcaacaaacccttactaagtacctatttctgcttcagtataccatgtttggtgccaggagttgcaaagacataataattctcccatctaagtgtggtcacatttaggaggtaatgagtgggatttgggctgcattattggaagacaacaaactaattttctgtttgtgtgtgtgtatgtgtgtatgtgtgagtgtaagcaagatgagatatttgaaatcactttataaattataatgcacacacaattaaagtatctgtgtgtccatacacatacagttaaagtatttatgtgtgtaacacatatgcataattagaaaaaagcctacacatatgtatatatcagaaggattgattgataagttatgccagggagataagtgtgattgtgaaaaccctcacattcgacctagatcttaatagtgagtgtcctcattctagggagtgcatgaacaaaggactaaagcaagaaagcatatgatttatttatggagaaatttggcttgtgtgactaaggcagacctggtagatgtatataaggtttgggatatgggtgactgccaacaggcctaatcgataatatgtttagaggagtacactggagtcaaattgtgaaggcccttatatgccattctgaataatctagcctgtaacctcatcagagaagctctggatttttcaagttagttctcttaatatatgattgtaacagaactgtagtttctccatcagggaatttagctttatcattgattatccatgatccaactcccctaactccacatataattaataattagtacttaccaatactaccccgtaaacacatcttgaatgcacctactccttttccagccccactgccattcattaatgcaagtcatgcttacttctcacgtggattataggtataatcagctcatgtgtcttcttatttacagtttatccccaaatattctctacactgtgaaatttatttctaaaagccaagcctgacattgctatttccctacttaaaattctgctttgatttcgaactgccctctggctatattttcaggctcttcataaataggttgatgataatttcactttttctagggtcatctctgccatttttatcctcctccaccatctctaggtctgggaaaggaccatactctttctctcacatcctgacactttcacctgctcttttgattttctggagttctcttttctaccacttgtctctctgctcttaattaactttcaaaactcagctgagatgtcacttcatcaaggaagctctggatttttcaaggtagtttccttaatatatgattgtcacatgactgtagtttcttcatcaggcaacttatctgtatatttgtatcaacatacccttttgttgtgtctgcttctctcactaagctagaaggaaaaaagctagagacactgcctttctcacagttgtttttctaccacctagtaggtgtcagtacacatttgtcacttaatagccttaaatatgaaatgtaatttattagtttcctattgctgctataaaattaccacaaatttagtggcttaaaattatatacatttattctcagacagttctgcaggtcagaaatccaaactggaacttactggactcaaatcatgatgccagaagggctgtgtacttttggatgctccaggggagaatctgtctccttgccttttccattttctagagaattcccacgttatttggctcacggccttcttcgtacatcttcaaaaccagccacctcggaccaagtccttctcatagtgctttctaattctccccttatgccaacatttccccccttttaaggacccctgtgattaaatcctgcccactcagataatctgggataatctccctatcaaaagttagctaattagaaagtctaattctatctgcaataattccactttgccatgtaacataatttattcacagatgtcagggattagcacgtggccatttttgaggaggcattattctgcctaccagagtttaatagaattaatatctgcagaggagaaaaatgagaagaggactaaaaagtaaatctggtcttcgttaacttaaaacacctttattgagcactactatgtaacacattctatgctaagtgctgggattacagctctgatccagacagtcactctcttggaaatgagaaaggatgtaggtgatgttattaagaacaacttttgtaggatgatgagcagtgaagactgcattacattgactgtaaagcgaatgggaaataaagaaatatctttgacatgaacagcttttctgttcttcgtgcagaagtttaattattttagacctcctcattgtaagctgaccactaacgtcacctcaggcggtagaaaaatcccataatcaaagactattactcagatttaatagaaagcatttttcataccattttccattgcagcctcctccactctgcactgccattttgtaatattaatggcacagtaaatccactttctaaatatgtcctaaatttgtttccttcctttataatgctccaaaatatcacataaccttatctaatgtttatcattaatcttccatatttttcatttttttctcatgtttgatggaagcagagaatagactgaacttaattgctctcccatattacttcatagttctttattttcttttctttcttttttttttttttttttttttttttttttttttgagacggagtctcctctgtcccccaggccggagcgcagtggcacgatcttggctcactgcaagttgcgcctcccaggttcacgccccagtagctgggactacaggcgcccgccaccacgcccggctaattttttgtatttttagtagagacggggtttcaccgtgttagccaggatggtcttgatctcctgacctcatgatccgcccacctcggcctcccaaagtgctgggattacaggcgtgagccactgcgcccggcttcatagttctttctttaagtgaaattaactcatcccattgcatttcttcactacgtgagtttctaaactggtatcaactttaatattcccttccccttttaaagatacattttctgtgtcacattagggatgaagatcttcaattaacatattaactagcccccaaggaaatatcatttaaaaaatgtttttctaggccgaatgtggtggctcatgcctgtagtcctagcactttgggaggctgagacagaaggattgatggagtccaggagtttgagaccagcctgggcaacatggggagaccccatctttacaaaagaaaaaaaattaaaaattagacagatgtggtgatgtgtgcctagagtcctagctactgaggaggcagaggtgagagaattgcttgagcccaggggtctgaagttacagtgagctgtgatggttccaatgcactccagcctggggaacagagcgagaccttgtgtcaaaaaaattttattttcttgtacagattatggttaattgctttgtgtaatgggaataattgttagtgtttatagaactgtttttctgtttttttttttcccccagtttttaaatgctttcacttacattgtttatctgatggcagagaagaggtcttaaggaggctctccagcatctcgctcctaactctcattgcaatttcattccatgccactccctttctcacattttagagtgcaacaaaacagaattgcataatgaatgagcgtgtactttcagtttcttatcactctgtccttgtccttactgtctgctcagtgagattcatctttatcctcctcctacctttattccttctttactttctctcatccttctgaactcaacctacccattaccttctccaaaatatcttttctaacacccatgtggctacatattcctttctccatgctcctataatacgctttaaatttatatatatttttgtttatgcaaaatgtttcatatttatctatgatgtgtctattatctactaggctaagagctctcccagactgaatcttgtttatattttcagtaactagtgcaatgtccaggtcatagtaagcattctgtaaatatttattttataaattattacacgagtaaatgatctcattatatcctgtcaatagctccatgagttaaagagcaattaatattctcatttcacagttaaagacgctaaggcttggcaattttaaggccacaattctaataagtcctgcaaagccactggaagccagttccacagatttaatgttccctcagtttgcccagtatcattcttctgcagtaacttgctcttgtgaatcaagaatattgcaatttaatatatcccacatttatattcctgagggactaaggaatataaaagttaataacagggtaaaagttcattgtactaatcttaaaaaatatgaaaggccacatatactgaataaaaataactttattagaaggggttaaagattactgagaggaaatacaatttttatgtcatgttagaaagctaattttatatgggatttccccgtagagagaataaaataaaacgttggtcagtttttgcaatttatgaagtagtggttcttcacttcttgacatctccagggaacagttttcaagtaaattttcctaagagagattttcttctttgcctctcttattaatatgcacatgcatgtttttattagtaaaataaaatcagttataaacaaaccctaaaggaaatgaaatagaatatgtgctgcttgaaatgactaaacaggagcatataatcattttgtaataaaacagctatcactttattcttttctcatttgctttgttgctgattgcacattaatatgttttactatagactatgtgactacagaaatagacatcatgttaacgtatcaaaatagtttctagaacaatttatatatgtgtgatgtgtatgtatggtggctttaggttaactaagggtatacagcttaaaatagtcaacttttaagcaatatgacaaatagcaataaaaatatatcaattcaagtaaatacgtataaaattttagcatactaaaataaaaattaaaaggcatatgaccacttgggaaaatatgtccattcactgactaaaagtgagtagcttaattttgatcgttaacttggattttatggttataggagttttctgcaaggaggtcagtgaactctatgaaactatatgcaaatatgtatgtgtagacatttttctatagagaaggttcattattttcatcagataatcaaatggagcccatgacttgaaatgtttaagaattaccaatatataattatctcattccaattaattttaaaatattaaatgctcaatagataaatgagccaggatgtaaacaagtattttgacaaaaataggaacatacagaataaataaatgcatgaaacatcttctacttcattagtaatcaaattaattatgattaaagcaaacatcaaggatctccttacatctaaacaaagcagcaataccgtaaaagactaaagcaacgaaactcctatgaatgacatacctgcggctgagatgataattcccaacctcattctttctgctaccagtagaagtgggtgtgatcacttggaaagtattataaagatatttagcaaaagtcataaaggttttcataatgttgaactgataattttttcgaagacaattataaaaacaaaaaagaagtgagtgcatgagcatgtttattgtgatttagtctctaatagcaaacaaaaggaaagagcagcttatatgagatttatgataaaataagtgaaaaagaaagaatattattttggttataagaaatatgtatttatggggaatttaaaagtgtggacacaaaaattttgattgatttttggatgttaaaatgtttccataatgatatataagacgaaaattgaaataccaaatatcaattagtaaatgtaaaagcattattatttgaagtattaacaaccatatcatccagcaccattaaagaaggctcattattcagttctagatcagttcatacagacaaataagttatgcattgccaaattccaggacgctattcacataggttacaacatacatggaacctccttgagttgttcaaaatagaagctctgatttcatggttgttttgcatttgcgttaatatgttcaccttttgtgactctgattatcttatggtattctgtattgttaattatgcaattataatgtaaatgatagatatctggtcaatgtgaaaagccatggactttgattcagaaaatctgtatcaagttcatttctgtcacttaatagctttattccttctcagcttgtgtttatgtataaagtagtaaattacatacagattgagaagacataattaaaacaaacttatgaatagtaaggcactaagaattgttatgtattttataataataatacaattaattgtattaataattattatgttgaagaaaatatatgctactataccaaaataagacaataattcattgaagacatttttcttgtattaaagacgtagaggtgagagaggacaactagcaaagatgtttatatgttgaagctcacatttagtgttatttacacagtaaataagtaacactttgcacataatgtcaaggttttcgtgctgccttcgatgcttacctaaaaattactccttgtccatataattgaaaagaataaaaattttattctactacgtatttttcacttaaaagcctctagattaaatcacttcaaaagacctcatattgagcttttggcagagggttttgggtatgtttcaaagacatctgaatgtatgctttcaactgactcatttactctctgctttctgacagaaagtacgcatgcacatgtaggaaatataagtggaattgcaaataaggtcatttacttttaggaatatatgtatatactactgataaatgatgcgttgaccaatcttcctccataaagtctatgaagatggtttaattttgaccatttgaaatgttccatttctttttaaaattattttggaagggctagtattaattttatgaaagtaaagatttgaaggaggctagaataggtttgaaaactattactatctgtttttatttattcacccttgtcaacaaaggaaatacttccatattgtagctaagatttatcatataccatatgaataatgttgatattgaacatacatatagaagcttgtgtgaataacataattaaataagaaaaatgtattttgtaatgctaaataaaatttctcacctaagatgacagtttgaaatttatttattcactgttatttctcatattgactaaaggaatctacttatagattagtattgtgatttaaagataaacagatatttttggtgcatgcatatatttgttatgcgaaagtgattccttatgtttttaagagaagcaacggagatttactactgaaaaatatatgagagcaaatatgattactttgtaaagggcattttaataacggttcttttaatccaagtagataaaatataaaatttatcaattttaaatatctctcagatgcattcatttactgaacattaactaatatgattatatttacaataattaaaaaaatagtcttttgcttggagaaaaacattttaatatatcaagattgatgatttttctgtccatttgacttaatactaatttccagtttaggggcaaaaagatcatttgtagaagcatgaattcagtgaagctgttttttaataatttttctccctaatcccttagtataaatctttggggacttttttctttgagtatttatatgtaaggcatgaagagtatcatttgcatttttatttgaaatgttctgacttttagatgaaaagaggtcctagaaattttagagttgtagaatctccccttccttaaagcatgcacgtatttgtcagatgtattttctgagctcttaatttgttcagacagtgtgctaagttctgggaagcaaagataactaaaccatgctcctgctcatcaggaaacctcttccatagtgagatcaggcccatgttagagtatgtagatgctgcaaaggaaggaataatcatttctccatggttgggtggatggcatggggaaaggctccgaaatagtttttcggagtaaatgacagctgagagtttcttttaattatactggagtatctattcataactggcgaataaatactgttattcagaggagactatttttttataatcatacagtatttgaacgactatgggtttggtcatattaattgtttttcagatattacaaatctgaggcgggatcttgctctgtcgcccacgctggagtgcagtgccatgatctcggctcactgcaacctccacctcctggattcaaatgattctcctgcctcagcctcccaagtagctgggattacaggtgcatgccaccatgcctggctaatttttgtattttcagtagagatggggtttcgccatgttggcctggctggtctcaaactactggcctcaagtgatccgtcctcactggcctcccaaactgttgggatcacaggcgtgagccaccgcgcctggccatttttcagaagtaattttaatttggatgccccaaaccagcatcactcatgtttaattccatttatcaatgaatgtaatactaaatgtaaaaaaacactaacacatcataatggaaagttactttggttgtaaaatatgaattatatttaaagttgcttcctaacttttatttttttattttgcattttagatgaaagagaagatgttcaaaagaaaacattcacaaaatgggtaaatgcacaattttctaaggtaagaatggtttgttactttacttttaagatctaagttgtgaaattttcaaaatggactatgtacctgtgtatcttaaaaatccgttttatttctctcatagtgtcattttattttagctgtgcaaatctggaaatattatgttcactcttatttaaggagtaagcagcagaagatatggcaaagatacactatttaattatataaaatgtatatctttgattcttcttgacaatgtgagtttctttaatgacatgagtcctcagagtttatagctgcaatcttccatcaagtagctagaatatgtcacccagcagaagaagatatgagggaattttgttgtgaaaattatcatttttttgtccctcttggtctttaccaagttcaagaaaagcaatataattgctttgggtgtattcagccactatagtttagagcatatttcaaatgattaaagacaataagttcatcttgtttttgtgcaggcttcaatccatactcttaatatttacttaatttgcaaatacaactcaatttttaatcaatagcgtgactctagatgattataggtggacacagagcaagatattcttaccttgaaaactagtattaggaatgcaatatatggaggtttattgggatgtcaaagtttaaaagacttgcattttaattattattctcgatttgggtaaatcaatcaaatgtttggtgagtcggttttcttatgtttccatcatgaatgtttgtatatgtatatattgattgcttaattgagacatcaaatctagataatggaaaaataaagctaataaaatatggcccttaaacccaaggctttaagagtggcatagttttgatagtggatattttgtttcttattgtaatgatttaaagagtcactaaaagtgaaaatttctactaaaatgcctgaaactcttaatagctatgaattactccctctatgggtctgattttgtaaaattcatgataatggagccaaaacaatccactaggagatccaatctcaaaagttctcccttttctatgacaaacatttttagaatatcgtctattctttgtggtatttggtagtagaatgttgccatgtactctttaatttaacttactgaattttaactaataaaagttcattttatttacttgctgaataattaacaaatttctattacagacgtaaacagaaacatgtattttaaaaacgttttttaaatcctcaactttttttagctaagtgaaataaaatataacaacacaaatatagaagaataaataaaaagtaaacctaggatatttaggaaagttattcataattctccgaatatttataagatggttatatatagtttaattgctgtatatactggcatcattgacatttttaagttttggaattctgaagcagacaagagacatattttcaaacaaacatacagacaaatcagaattgtgaagaaattttctgaaatagtaaatgtaacaatactctgaatctttgaattgaactagagtaatttttaaaaggtgtgtaaacatgacaagtactgtgtatcctcattcccgcaagttgaaatagatcttcgctctgtgcattaaccttttccattatcatttatcacaactcacctgttaatatagaaatcaaagcttgatatccaatccatcctctatttatatattgttagcactgcctcagagcaattcggtatatttttttctgtccttatgaatgcccatatcttaaaactgtaaaatattcacatatatgagcacatttattgttttcttccaaaatatttgcatcctctaactcaactcacacttttcatttatattacaaatgttctccctaagtctgttataactgatcaggagagtcaccattctttcaagtacagaaattctattatcaagcatatcctaggtgtcaggaatagaaataaaagtttacaaagacagaggagaaaacttatttaaaggtaaaatgtatatatacctgtgcactaacttctaattttgagaacttgcaaagaatctttttcctcttttcttattcttttctgtcaaaacttagctaagtgactgcattcttttagacacttttgaagaagatgggaatttagaggaagctagttgattcagtttaagccacttggtgaaaccaaaagataaacataattgtgatatatatatcatttggcaatttattgcatcgctgcatgcctttcagcagaattctagccctgtaggatacacagattagttgaagtggaatctcctgaactcatggaacctacacagttatttgggagtttttggttaattgataaatggagttagaactgagtgggctcagtgtgggtggtctgagaaggcagtaatctgagctagagggaatctggtaacctttatgaagaaagctctaaaatgtgagcccatcaaaggcaggaatgtatatcttctatataatctcattgtttattactagtacactatataaatataataaatatactaggtcagtagtacaaatcattaaatctatgctaactgtagaaacagaagaaaaactgggtggaaaaattgtgttgaagaagactttaaaaagagaaaaaagagaatgaaaaattctgtctgtgtggtaaattagacacaggcacacacacattcatacaactataaaaatgcctcactaataaatctaactcatattcatttttatagtcgtattaatgtctatctgtgtctactttaccacacagacagatgataatttttcattgccttttatacacacatttatataatatttgtaaattatagagagacaacaaaatatttccttgttattttgtaaagctacggaagggatatttaaaggaaataaatgtgattaaatgtatccttgttgttgtggcgtcatttgaagccaaatgtgtctttgcagtaaatctaactgattttccactttcctggtaccattttaaaaataagccctatctctttttaaaataagtcttctattaactttgattccaaaaaattctactagaatgtgatttatcacatctattatatagagataactgaacaatatttatctccacataaacacaaaaccatttctagataagattaattcagagtaaatattctttccatgtaatttattgatatgttataatcctttaaaaagcctcgtgtatactctatgacaaatatgattcgcattataaaaatcttgctcatccatgccggcttaataaagggaagtacagttttgaaaacatgaccaaaaataattttgtcataaaatgtgcttgatgtttgtgtttgagaaaaaattttatgggaaaaaatatttactgccagctcaattgagagagataaactatctcccaatgagtgatatgatggttttgatcctatactgaatttagtaatcatctttatttccatactcactcttctgtctgatttttttccaacatagtatgcatgtttgacttaaatgaagtagaaatgcataattagttttgtctaatgtcttcacaaaagcccatgatatgatagtgttcctggaccaaactgaggattgggctgcttattcttgtggcccaataacgagatgcagatgaacgggaaaaggagagagtttttatttctgtaagtggttacagggagaagacctggaaattatccccagaccaactcaaaactataaagttttccagagcttatataccttctacgctgtatgtctacatgtaagtgtgtatccatctaaagacataaatgattaacttcttctgatctgtaactaagatctgattcctgaagacattcctctggagcctcagtaaatttactttatctaaatgggtccaggtgctgggatgattacccttatcttatctccggctaaatcatggagtttgggggagttccttcagatgcccagtaaacttgtttgtggagtcctggggagtttcttcagacccccaataaagcttttttaattctaaaagggtcctgttaagaattccttcattatcttgtcatgcttcaaggcccaggaaaggcctgggcaaaactcttggtgggcttttgttaccgtccagcctttgtttaagggcgctggctctatcagcttttaatatgtaactttaccactcagtcagtgctgaaacagttgttgtggaggcctgcattagtgagacctggcctgccacaatagttcatttacctcttcattgccgcaacatatatgtccacattaaaaatccaggactcaccctctttgggcaatatcatgtgataaaataaattgatatgacatacttcttgcaagatttctttttaatttaccttttagccagcatgataagcatgatgtagggtaaattaacactaaacttttgagtcagtaaggtagcctttctttttttaacttttattttaagttcaggggtacatgtgcaggtttgttatataggtaaacttgtgtcacgggggttggttgtacagattatttcatcacccagatattaggcctagtacccattaattatttttcctgatcctctccctcctcccaccctccaccttccgataagctccagtgtgtgttgttcccctctatgtgtccgtgtgttctcatcatttagctcccacctataagtgagaacatgcagtacttggttttctgttcctgcatcattttgctaaggataatggcctccaactccatccatgtccctgcaaaggacatgatctcattctttcttatggctacatagtattccatggtgtatatgtaccacattttcttggtccagtctatcattgacgggcatttgagttgattccacgtctttgctattgtaaatagtgctgcaatgaacatatgtatgcgtgtcttataatagaatgatttatatttctctgggtacatgcccagtaatgggattgctaggttgaatggtagttctgtttttagctctttgaggaatcactacactgacttccacaatggtttaactcatttactctcccaccaacagtgtataagtgttccattttctccgcagccccaccagcacgttattttttgataaagcaggcttcttcacactactctctaccttaggagaaaacgttatatccatactttaatttatttgaaaagaaaggtgaatataaaattgaaattctctgagtcttatttttcttatatgttcttgcctacttgtaacaaaacatataataaaagggcattataaatagtaaatcatataaacacaaaatattcccatttttgtcattatgtaatgtattttctgaattgaattgaaaaatgcatatatttatgaatttttttctactgaatctctccttcttatttacttctattcttttccatgatgttacctggtcttcttgagaacatgatattttaattgtaatcattgtgttcctaactccataatttcatgatgctattgaaatgcacatgaattttgattctataacctagtttgtaataagccatatttccttgtttctctacattggttgaatctgttcctgcagcaactagtaaccccaacaatctgactggtgagaaattcaatctccgtaacattttgcattcttctacttcttcccacttccattccaaagggccaggtagagtccagaatactgtaagtgtcctggttttcagtgcattttggtcatagctgatatgcttaatagccaagtaaacatgactacataaaggacagcttgtccacaatgccctgccttgcttgaacacggaaggttttgctgatgatgctctgtgcttggtatctggcctctacagccatttaagtaggttgtctcagcacaacatttggaaactctgtaaagggagtaggatgttggccttcacaacttcatccctttccctgtgtttgaggaagctcattaaacctctctttaatctgactgattgcaaatttccactgtccccgaatcttaactcccatatcccaatagcctgttcagttgggacaatatatcaatccttaacatgaatctagattttcagaactaaagtttttgaagggtgattttcctctggatacttgttcatttctttattgattatggttttggctaccttcttggcatcaaacagggaaaacagagcatttattcatgtgttactatcctattacactctgtatgccaattcatgtcctcaacacgtacacacaaacacacacacgcgcgtgcgcgcacacacacacacacatacatatacacacacccagtaaacatattctatatttaaaatgagcttagaagtttttaaaaaaggatgatactgggacaaagtggcaaaacattatttcagtgaaggaggtaacaatatatatgtacctttccattgtgtaagtgaattctaaatctgtatatagctaacacatttatatataactattgtgcaatgtgcctgctttaacagaagtaatcgagcagagctattgtgccatggaaggttttacatagatctaaaatggctcctgtgcccctggcttcctgtttgtttttatctgataataggaagaattaaatcattagagcagatgacgtacagtgaactatgtctctggatgctgatgagcagcctgcacaagactttggtaacaattgaattatttagtgcaattattttggagagatgaatattgatacaggaaacttacggaaatcctcgtttcagaaatagtgaggattgggaactttttgtttatgtataccatgatgttaataatcctactgaaaattatatgtatatggttagttgctccaataatcatatgatacaagtattcaagatgagtaaaatgtgaatttatgtggcttgctcacagtaaataggagagatgaagctaggacccaagaaaatggactctaaaactcatgatatttccatacctattattgttgggacaaaaattccacctacccaataatgcatttttgggacaaatcatcaaattgataagtcctatgagaagcaggcaggggggttggagacagtgaagactcaataacaggtggtattaaatgctcgcttactcacagaggatttaatctacctttgaatgtttagtaaccccaaaatgcaaccattgtttaggaagttttttagttgattctttctgaatgatttctaatacaaatgcccctcaacttgtgtggttaggtccctataaacccatcataagttgaaaatatcacaagtcaaaaatgcctttaatatacctaaccttcgaaacaacatagcttagcctaccctactttaaatgtgctggcttaacactatcctagagctgggcaaaatcatttcacacaaacctattttataataaagctagctcatgtaattgattgaatactgtactgaaagtgaaaaacagaatgcatgtatgggtactcaaaatacggtttctactaaatgagtatcaccttacactattataaggtcaaaatatcttaagtcgagaactgtttgtactttaaatgttaatattttttacatactgcgttttggtgagtgaagtaaacttagtttgcagtagagttatctaaagtgatattgtcattttcaaacattgctttttatttctactactcataaacaaattattgtgtttacatgattatttgaatattaacttaaaacagttttatacgaaattcaaaataccactttactggcatgtgaactccctaacatctacacttggtgttaagatgacttgtcgaatgatgtgtttgtgtttggaatcaagatgattatactaaatggtttaatctactgagaaccattcccttgaatgttttcctgaaacaatctttgcaaagtacctaagtaacaaaggatattactcagttagtgagacaaaaatggattgtgataggtctcactgttttcaaagaaagacaaatcacttattgttaatagtaaagaagtttcttagaaatatgttgctgtttatcaacccagtgttactgagatcttgacaattccttttagaaggtaaatgttttggtctctaggttatcatgtcctgatacaagaaaattggaattattgattacacctatattctctggagtggtctcagtgccaagcatatttagcttgcatatgtaaatatttaccaattagcatgatagttgctagcaaaaaaaccaattctttatggctgatgggcctatccattatttatctgattttattttgctttctagcaaaacaacatacatggacattagtgaagcatttttatttagaaaagaacaattgacactctggtaccatcctatcagagatatatgtttactaaaataacctttcaacatttaacaaatacttattgaatgccagctatgtgctaatcatactgtcatacagtgatgaaggcataacccaacatggttttccctctccaagagattatcatctgagaaaggaaacaattgcatcaacaaataattaaaataaaacataatctttaatgcaatagaaatgctgtgggaacatagaagacagaatgactaattgcttggagaggataatagctttttaaaatatggtgacatttagtctggtgttgtctacgcagagacaatttcaagaaagatgaaggcagaaggaattgcatgtagaaatgtgtaataatcaaagaagtatgacttgtcaggtgagtagtagcaagggagatctttaggagtgaagaagagaggttgtgagagggcatataatgccattcttgaagaattatattgttgtggggctggttgagccaacaataagataatggcttagtcatgttaatttgcaacttctgattgaagactgtgaagctctaaaacaacaggcaatgatagaagaattagactgccccaccaccactaatgcttcatgcaaaatttggtctgaagtctaccctttacatttggcaatagacatagagacctaaaatggaaaagcaagcaggctaccatttttgtagagttgtttgataccatgcacactccaaaacgatgcagcaaaacgcattggaattacctagaaaatgtgttaaaacatggattgctgaggcccatagtcagagtttctaattccataggtctagggtgggacccaggaatccggatttctaacaggtcctcaggtgatgctgatgctgacggccaaagaaccacactttgagaaccacagtgttagaatttcagtaatttaatcaggtctgtagtagagaatgttggaggaaaccccactgaggaatttattgaaccctcaaaggggaatgacctttttccagttgagaatcaatgcaagtacttgatttaaattgggatttattttgtggggactatactcaaaaactgaatgagttaaaagactcaaaatcaatcaatctgatactgattgagcattcttcgtccaaaacgtttgaaaatagaaatgtttcaaattttggattttcgtttggaatatttgcattatacttactggctgagcatctcaagtccaaaaatctgaaatccagaatgctccaatgagcatttcctttgtgtgtcatgtcagccctcaaaaggtttctgatttgggagcattttggatttgggatttttggatttgagaggctcaacctatacctattttttaaaaaatgtgtatatatatatatatggatatacatacacacatatatatgtacatatatacatatttatacacatatatgtacatatatacatatttacacacatatatgtacatatacacacatatttgtacatatatacacacatatgtacatatatacacacatatgtacatatacacacacatatgcatatatacatacacaaatatatgcatatatacatatacacacatgtatatatacacgtatatatacatatatacacacatgtgcacatatgtgcatatacatgtatatatacacatgtgcacatttgtgtatatatacacgtatatatacacatgtgtatatacacatgtacacacatatgtgtatatacacatacatacgtgtatatacacacatgtgtatacacacatatgtgtatatacacatacacacgtgtatatacacacatgtgtatacacacatatacacatatacacacatatacacatatgtgtgtatatacacatatacacacatatacacatatgtgtgtatatacacatatacacacatatacacatatgtgtgtatatacacatatacacacatatacacatatgtgtgtatatacacatatacacacatatacacatatgtgtgtatatacacatatacacacatatacacatatacgtatacacacatatgtgcatatacacatatacgtatacacatatacacgtatacacacatatgtgtatatacacatacacacatacacacatatgtgtatatacacatacacacatacacacatatgtgtatatacacatacacacatacacacatatgtgtatatacacatacacacatacacacatatgtgtatatacacatatacatatacacacatgtgtatacacatacacacatatgtgtatacacatacatacatatgtgtatacacatacatatacacacatgtgtatatacacatatacacacatatatacacgtgtatatacacatatacacatatacacacatgtgtatatacacgtgtatatacacatatacacatatacacacatgtgtatatacacatatacacacatacacatatgtgtatatatacacacatacacatatatgcacatgtgtatatatacacatatatgcacatatgtgtatatatacacatatatacatatatacgtatatatacacatatatatacatatatacgtatatatacacatatatatacatatatacgtatatatacacatatatatacatatatacgtatatatacacatatatgtatatgtgtgtatgcatatagacacatatacatatatacacacatgtgtatatatacgtgtgtatgtgtgtatatatacacacgtatatatacataagtgtatatacacatatgtatatatacgtatatatacgtgtgtatatatacatgtatatatacatatatgagtatgtgtatatatacacgtatatatacatatatgagtatgtgtatatatacacgtatacatatatgtgtatatatatacgtatacatttatgtgtatatatacgtatatatacgtatatatagttgttttaggttataagacttaaaaatacttatctgatgtatatatatatttttaacaatcctagttattttgtgtttcagggcagataggtgatgaataaagatattaatataattgtgttcaaaggttagaaaaaaacagttcgttgtggcattactattgactgtatccgcaaatttctttcactgcaatcctttcatgggctactatatatttttcttaagaataaaacatttccaattgacctacagagtctttcaatctctcttttgtgctttactttgcttcagcagaaggatttcattttagtgacactctgaaggtcttcctctgtgcttcacttaagggtgttgcatttttaaccttaccaagattcctatggattcctagaattatatttcaaattatgatcatggtagccagaacacaaagaattaagatctactctgacagtaatgtactgatataactttaactgtagaaacctttcttgtaatgcacatggagggcagacttgtatgtatcttggaacataaaaggcagagtatggtttttaaaagggctttgcttatttgtatcctaatttagctaatttcactatgccagttctatatgcagagataagtaatagtaaaaatggacaaaaagtgatcaataaacaagtgatcactttcggtcttgtccagaattgtggccaggtgatgagtgcaaactaagagaccttttcattagaaatgtgtgaagttactctttggtttagcattagctgtcttttaatgagaacaaatgagagttgcagatgaatttgctaaatgtttctttctttgatttagtttacctggcctgaagaaaaaaaaatgtcttcgatctacaaggtctacggagagtacttttcataggaactagtcctattaaaattacctgcagttattatgtcagtcagagaataaatattttgagtatcatatctgtacttgaagttcttatcctttacaaataatttatatttaaggaaacatgctttgacagaaatacacatgaagtctacattctctatctatttcatatcaggtgctctagtgttttgaatataacagttaagagatcaagtccctttaatcataaggccctgttagctagcgagctaaaccaaagagggaaacatttagcaaactatctgacgttctctatatttgtttgtcaacttgtttgttttttctctctgcaagtagaatatagaatttcagagagtgacaagtgctaagagaaaaaataaagcaggataagggtagaatagggatatttcaaagggtaggttgccattttatgtagtgggtcctggaaaagcctcacttaagaggcatacaaaaaacctgaaggaaggaaaggagggcatcttgcaggtgtcttggagaagagagttctaggcagagggaagaatatgtacactctgaggagggagtgcgtgtttgtgggataacaagggagtcaagatggctggtgcagagtgactgaggaagagcggtaggatctgcaagtggagtggtattagaaggacaaatcagatagggccttattgaccattgtaaaggtcttggcttgtacattgtgggagattaggagattttgagagttctgaacagtagccagaaataatgtaagttagaatgtaggatgtaaaggtagaagtagagagatgagttagaggataatgtagtaatgaaggctgggtgtgtgcgtgtggctaggattaggttgatgtccatggatctggggagaaatgatcgaattttggatacattttgaaagtagatgtaacaggatttgctggtggactaaaaatggagattgagagagtggagaaaaacagttttagcttgagcaaaaggaaggatgggatggttatttactgggataagaaagactattgcaagagagagtttggtggcaaagtataggtaaatttcccatggaaaatcattgaaaataattttagttttagtatgtttttatggaaggagtatttattttcaactcctaaaatttatcctcaagaacaagaataaatacatttatctctattaaaaaataaggaacaatgagagatgatacaagtgcctctagcattgtatgagtgtgtacaaccagtgaacgttaacttgtaaatccagtagcagtaacttgatctttgtctctcttctgatctgatagagtgcaaggtctatgtctacattcatttttttgcatgtagatgtccagttgtttcagcattatttgttgaaaaggctatctttgctccattctattgccattgctcgtttgtcaaagatcagtaaactgtattcatgtgggtctatttccacactattctgttctattgatgtatttgtctattattttgccaatacactgtcttgattactgtcatttcatagtaagtcttgtagtcagatagtgtcagttttccaactttgttcttctccttcaatattgtgtgggttattctgggtcttttgcctttcatataaactttagaaacggtttgtctatataaggcaaggtaacttgctgtgattttgattgggattgcgttaaatctgtagatcaacttgaggagaactgacttctttacaatattgagtctttctatccatgaacactgaatatttcaccattcatttagttcctctgataactttcatcagagttttgtagttttcttgtaaagatcttgtatattttttagatttattcctcagtattttatttttgaaaatgttagtggaaatggctttgtgttttacatttcaaattccacttgttcactgctggtgtgtaagaaacaattgaattttatatattaatcttgtgtcctgcaactttgctacaattgcttattatttccagggttatttttcgattctttcagattttctacatagatggtcatgtcatctatgaagaaatacagcttcatttctacattccaatagatatgtctattttctttgtcttattgcattagctaggacttccaatatgatgttgaaaaagagtggtaagagagacatttttgtcttgttcctgatcttcctgagaaagttttcattttctcaccactaaataggatgtcaattataggtgtttttgttcatttttttatattgtcatgaccttgttttataaaatacaattatttctctcctaactttctgtggacctcaattataattttcccataattctcttctgcttgcattgctcatgttttctgtcttcttcccatttgttcttatttgctttattttgaggaactgtttctcattattgaagtcattcctcaaattacaagtgatcttagcttttggtttatatttaagtgtgagatactaacatttgataaaattaaaatctatttcatgattaaagtacatttaatataaaacagaattgaataattttgttgacatattatatatatatatgcgtgtgtgtgtgtgtgtgtgtttgtgtgtgtgtaaagtccaaaagtttgtacattacttaaagaagaaacatctgatgcattctggataaagacaggaaaaccatatgagtactacagctacctccattaatacttaacattgtgttgaaaatattagccattgcaaccagacaagataaaccaattcgaggcaaaacaattgcaagcagtggtaatgggatcccaatttacagatagaattgtttacctcaagagatcacacaaaacaataatattaacaaacacaaatatgaacacaaacaaataccaataaaataatttagtaagttagcagactataaaatttacaggcaaaatcagtaaaattcattttataggtaatgagctagaagtttttatggatggtgcacacccatttgcaacaatagcaacaacagcaaaaacaagaaacacatttaacaagaaatttcagtacctatgtttaaaactctcctgaacaacccaaaaggaaatcaaggagaaagatgctccttgttcctgaaaagcatggcttaacattataaagtaaactattgtttttaagttaatgtgtaaattaaaggcattccaatataataagtagtatttttttctggagttggataaattgattataaactttttataaaaaaatacacaagtaaaaataaccagaaaaacactaaaaataaatatcgatgaagggatagggaaacataaaattataaattaaaacttagggaaaactatcatattaaatataaattttcaataaaaactaacaatttgttaaaatgtgttttgtaaaaatatatttctatcagctgggaaggtctggtagtaatgagtatacctagcatgcagatattcattggtaagtctcattccacactgaaagaagtcacagctcattagaagaatatatgatacttcatcctggccaaggaacatagtgggtgagcctgcagcctttgttagagccataaggcaaggaagtacttcccaaaatttgctaacatcttgagttgttcatttttcttctcctgttttctttatgcttgtagagttacacctttttaaaaggttttcttcctgtcattttattggaaaggcttcaaataatttttaaaacatatttatagatgttcatactcatatattttcctgatactgaaagagaaatttatgcatttagtaacaataaatgttggcctagattttctctgatggtctcttcaagaatctggagcgttctctatctccacaaaggatggaaatgtttcatttcaatatgccagttttcaagtaaatgtgatttagtttctctcttttaagaataaagtcatagcagaatgctttatattactgattgtagtatcataacttacttctgaaacatcgaatacaattttggaaggtcagcaatgtcctgttaatatttaagtatgcctcactatataatatgtgcatacattctggaagaagcatttaaaatgaagactgtttctaataatatattaaacgagctatgtaagtagagttttatgatagctgatattgtgattttattcagagactatttatataagacatttcagcatatctgctaaagaacaaacctatcatctaagtcagtaaaccaataatttgaattaaaaaaacggacaaaaagaaaatacgaagcaacttgaaagatcattaaatacactgcctgatagttaagattctaaacagttacattatatgaatagtttactgtatattatatattttctatttccactttgttataggtaagctaatcagatgtctcaagttataaaataatagcactaacttataaaagaagtgctacctttcttccactccccaaaatacacaagattttattcttcataaatgataacatttgttgtttgttttctgtggttgaaagggaagtacaggaatgaaataatgtattttgcaacaacttggatagaactggaggccattattctaagtaaagtaattcaggaatggaaaaccaaacaccgtatgttctcactcataagtgggagctcaactatgaggatgcaaaggcataagaatgatataatggactctagggactcagagcagggggaagggtaggagatgggtgagagataaaagcctacatattgggtacggtgtatacttctcaggtgatgggtgcaccaaaatctcggaaatcaccactaaagaacttacccaggtaaccaaaaaccacctgttcccccaaaagtattaaaataaaaaaatttaaaattttgaaaaattaggaaaaggaagtacattttcatgtgttgctctgttttagcacacctggtgcagaggtccctgaggaattttttctttttcttttttcttttttcttcttctttttttttttttttttttttttttcgagaaaaaaatatcacacatttgaggcaggagaatagggtctggaggaagggaacctaaggccatttcacgctgacttccctaggactaaactgaaggcaaaaccctaactttccacccctaagtaacataaggaccagaggctactccctttgcaaacctcccaccttttctgtgtagcagatgggaaattggctgttcccaaccaatcagactgattgcgggcccagtctttgcacagaagtgcaactttgtaacttcaccttagcctctgattggttgctttttgcaaccaatcagatgtttgcacaggagagtgtcctatgtaactctacttcagcctctgattggttgctttccacaaccaatcagaccaattgcaggccaccacttcatttacgtggggtgagcatgaagtggccaatgggaaacctgtagagggtatttggaccccagaagattttctttatctgggcacttgagccgctgctcagcccgctctcacactatggcatgtacttttcattttaaataaatcccttcattccttccttgctttgtttgtgcattttgtccaattctttgatcaagacaccaagaacctgggcaccctccactagtgacacactgataagatcttattatattgggctgataattcacctacacttttaccttctgaatagaaaaggcacttgattagagatgtatatatctaggtgctgggatcaactatgccatttgcaaagtaccttacttcttgagcaagaaggtaaccaaaaggggaatgaataggcaatataatttcttttaaaaatgaattagtaagctcttgtggttacaacaagaggactgttgttttggttctttcacaattttctatagtaaaatttgttagtattaaagtataatgttgatgcctatatttttaaaagatataaaagtagagattttaaaagagaattaaaaaggttttgagggaactgttttagattaagtaagataatgaagagaaacaatgcttaaaatattagaaaaaaagacttatgagaaaagtcagaagtactgaaactgtctagccaaagtagaaacgaaaccaaatgatacctttctcattcatattaattatttgaatgctttggttttgtttttctttattttatattctgttagacgctgtctttcttgtcttcaaccaattcttttctatgtaacattagacagtgtctaataataatacacaaaacaaaaaagttgtaaagaaaccacccacattttctcttcaaaagaaaaaattgtctgagaactctgaatgtctaaagtccttgaataataatgggaaatggaggatggttcatgagtgtttttcagtattagcaaaagactgacaaaagcatgagtttatcaacaggaagtacatatagtcagacttatagactgaaactgttcctaaagctgtgtgtccctgttttagaactatcaccacagtcactgaagccctgggcaattcacagacattgcaaaatcaccacagtccctgaaggccaaagaatgagacacaggagtcttttatcatttcataactcagtgtgcccattcttcctaataggcaggacccagcatctgtggtcctcaatacaaccatttagaaagtcacattgtagtcactccttttgcttgttctggcagggactgaagttggagcacaaaaaatcttgtaaaattcagttcctatatcagggtgtttccccctttttatcatgaagtcacatgtcccatcctgtgtcttaacagtaggtgattattagaagagtagctggcacacagtagatttataataaacaatggaataattagagtgcctagcgcacagtaaatttataataaaaaatatagaataattaatgatgaagaaatgaatggtagatgtagtagaatagaaagatatataggaatcctgagaagtttggcagcacatccaatagaaatgtattgcaaaaagtttatatagtatttacatttcttatagcctcatttaaaaactgagaagaaacaggtgaagtaattttaataatatttatttaactatatgtaaaacaaaaatattatttcttcaacaggtaatcactatatcaattagtattatttattgcattatttattgtaccacctctctaaattccgttgtgaattttacacttccagcaaatctcagcaacacgggatagccactattcaggtgctccaaagccacatgtggctagtggctaccacattacacagcatagctatagaggggtcttagaatattctgactaagtcaggaagggacttttgtcacctccaccaacatcccatgggtcagaacccagttatatggctaaacttaattgcaaaggaaactagaaaatgtaactatagaggaatctttaagaaactattggtcagacaacctaagtgtaatgtgacaggatattatctaaaatcttaatttgaaacaattacatatagttgatataaaatgcataaaatagagaaggatgtactatttttgaagccaggttcaaagtgtatataatgaacactattgaacaaagcaagatttaaaaaaaattgtgaattgaataaaatatgtatagtaaatgtacactctattatgtaaactaaagtatgtttagtataaaaacacccctatactaaaactcctttcaatactccaaagcagtaagaaaaaaaacacaaaatatacatttaccaatcttaatagtctagcttataaactgatatggaattcgttacatgatccctgtttgaacattatgtaagactagcccaggaaatgatatggaaaaaggaatgaaaggtaactttcaacgaagttacatgggagagtgatcaaaagaaaatgtgactttttttccttaactcaacacgtgtacgtgacgcttcaagtatgcaacaatggatctgtgctcaagtcaaatgcacagaccagaaacagaaattggtcagaagacatttcttgttttttcggttttttttttgttttttgtttttgtttttgtttttgtttttgagatggagtctcgctctgtcacccaggctggagtgcagtggcacactcttggctcactgcaacctccgactccctagttcaagcgattctcctgcctcagcctcctgagtagctgggactacaggcacgtgccaccacacccggctaatttttgtatttttagtagaggcggggtttcaccatgttagccaggatggctcaatctcctgacctcgtgatctgcccgcctcagcctcccaaagtgctgagattctgcgttggtcatcaatgtttaaacatgttaaacgtaacatgttacatttaagtaacaatacctacataatcatgtaagtacattcattgccaacttaaaagggagtcttcaaagcagaattgtcagaacttttagcttccctgggccacactgggagaattgtcttgggccacacattaaatacagtaacactaatgatagatgatgagctaaaaaaaataaatctaaaaaatatctcatgatgtttcaagaaagtttacaaatttgtgttgggctgcattcaaagctgtcctgggcctcatgcagcctgtaggctgcgggttggacaagcttgcttcaaagctaacattttttctccaaaattttccctactgctatcgcgatcaatttgtttcctctgaagtgactgattttaactgagatatttttgtttgtttgttttctggttctgcatgtataaatccttcgaatagtgtaaggacactgaatttccagcaacttctgtttcgaaggttcacacttcaaactataacatgttgtgtaattattggaaaagtgtcctaaagcttccattattagcctataaactatagttttggaagagactttgcccaccattttacattactagctgtgagtgcctaacatttagtaagtacccaagaaatatgaatgttagaataaagtcatacatataagaaattctttacattgttcaactactggagaatatgttatatgtagtgattatttttaaaagcattataaaaagcatttcaatttgttcaagcatctcaataagttagttaaaatacacagaaaatgaataaaacaattagaatatatatgtagcatttgtgtgtgtgtgtgtatataaacatatatatgcaaatgtgtgtgtgtgtgtatatatatatataaataggtagagaactttaaagtaattaaaatctgaatgtggttagctcaagtcaggtaaatttgagaaaatctttacaaaagccatttgctcatactactcactctcagattagttgttcatcaggtaaacaatttgctaaataaacatttaaataaaagaaacacattgcataggggaagaaaacataattttacctctaccttgattttttttttttttttttttttttttgacactgggtctcactttgtggcccaggctggagtgtggtaatgcaatcttgtctcactatagcttcaacctcccgggtttgagccatccttccacctcagcctccccggtagcttagctacaggcatgcaccaccatgccgggctaatttattattttttttactttttggagaaatgagggtcttgctatgttgccaaggctggtcttgaatgcttgagctcaagtgatccttcagtctcagcctcccaaagagctgggattacaggtgtgagccaccgcatctagcctctacctttatttcttaactgggactcctataacaaaagagatatcaacaagaaaaaaacaataaagtttactaacatacacacctcatgtatacatgaaagatatataaggaaaaatgaataaatttctctgacaaagaacaatacgttttttgagaagtaacaagacaagggaaaaggaccctgagtctctatgagtggccaatttcaggaaggcaaatatatgggaaactgatggtagataaaggctagttaagaaaatttattatgtagattcctctgatgcagtctccgggctgataaagatctaaagttgtcattggtgatcaaactttgtcctttctgatagagaggagaggatggacacctttgcaaatgtatgtactgttttcaggcaaatagtgggagggcagagaacttatatctgcttcttctgaattgcctttagctcaaaatagtcctgtgtcaaagtggcatattttcatgaacatagagaatggaataatagacattggagacttcaaaaggtgagaggggccgggtgcggtggctcacgcctataaccccagaactttgggaggctgaggcaggcagatcacgaggtcaggagttcgagaccagcctgaccaacatggttaaaccctgtctctactaaaaatacaaaaatcagtcgggcatggtggcgcgtgcctgtaatcccagctattcaggagaccgaggcaggagaattgattgaacccaggaggcggaggttgcagtgagccgagatcgcgccactgcactccagcctgggtgcacagggcgagactccatctcaaaaaaaaaaaaaatggcgggaggctctcatgtaccccagaaatttatacacctacagtgtacccacaaaaattaaaaatacaaaattttttaaaaggtgagattgtggcaggggagtgaggagtgagaaattacctattaggtacaatgtacactattggagtgatggtttcactagaagaccagacatcactactatccaacatatgcatgtaacaaaactacactgtacctcctaaatctataaaaataacaacagaaaaaggcaaatatacatatgctttcttatagattcattaatctgttttatttcagtgaatgaaaacttttgacaatggctaaccttgaaaatatgttattagaacatgtttttctttctccattgtgccctatgagcacaacttgagaaatccagcaataaaatgcaagctagtttttttttttttttgaaacagtcttgctctgtcgcccaaggtggagtgcaatggcactatctcggctcactgcaaccttcacctccagggttcaagcgattctcctgcctcggcctcccaggtagctgggactacaggtgtgtgccaccatgcctggctaattttttatttttggtagaggttttgccatgttggcccggctggtctcgaactcctgacctcaggtgacccgcccgcctctgcctcccaaagtgctgggattacaggcatgagccaccgcggccatcaagcctgctttcttgacatattttgtgacatattttgggatggcatatttcggtctcctacagttggcagggcaatctaaagtactttaatatccttcttcatgatactttcaaaaaatggaatttgatgcctcagaaaacaatactaaaactttcttaaaatattacaatgtgtactatattacttttttaagtaataggacttataaatatttatttttaaaatttgtaaatatttaccatccacctttgattgaacatttttttctcattattttatccaaaaatgtctattgagacctttaaaatttgtattttgtggcaccatctaagacgtgatttatgctccttgtcattatttaatcgtcaaaatgatactttgtctttgcttaaatcagtgtgggtacatcgaacaaggtttgagagctactctgtaggactgagtcattagcctgtaattttacagcggatcaagtactacgttttcattacttggaaagaaaatgaccttgcaattgactcttacatttaacgtttttatctcagctttaccaccattaaatataactgtttgcactgaccacataagaaaccagaaaaatcactgggtcacagtttaatctaattcaatttaaatccgagctagatagctataattggcagtttaccatatcaaaggccagagttaagttacactcaaaattgtgttgatttggaagtaatttgccttaaattttcaagcattgttctgggggtactaaaatgctctttcaagagtttactatatggtacgtaatattttccaagtgttagatgatttatgaagtctacattattatctaaaacaaccaatgttgtaactaccatacaagtctatgaatagaccttatttcacttggcctatctcagggtacaggatcccagccttcttccgtggcaatatgcaggctgttcctcagcaacgatttctagtattgtgtgaaataatcatacttacaatactaacttcttgcttcccaatgccaagaacactcatcttgtttctattgaataaggtgacaggcatgatagaagcagggcagagccaagtcctgacagtaacatttcaagtacagagaaattcatatgagaaaaatggacaatgagggcttgttgtccgtgactttttgttccatgaaaaatatgcctgttagcaaaatcacataactaggaattttagataaagtttctatgtacattatttaaaagagtgctttatacggcatttaagttaaaaagaaagaaaaaacattcacattaaacctaaaagtaactaaaaagtcatagaacagagatgtcatacagatggctagcctttattaagtgtcaagcattgttataatggatttgcatgagttctttaattgcatttatttatcttgttttggtttggtttttgagacaagatctcacttcgtcactcaggttggagtgcagtggagtcattgcggctcattgcagccttgacctccaagccatcctcctacctgaacccccaagtagctgggactacaggtgtcccccaccatgctcagctaatgttcctattttttgtagagatgggggtcccctatgttgcccaggctggtctcagactccatagctcaggtgatctacctgctttagcctctcaaagtgctggcgtgagccacggtgactgaccttatttatttatttttaatgaacaagtaacagttgagtaatttatggtgtacaatgtgatattttaatctatgaatatattacagaaacattcaatcaagctaattaacatatctatcacctcactaacttatgttttgtggtcagaatgttgtctactcttggtgggaatgtaaattagtatggtcattttggaaaataatatggagattcctcaaaaacctaaaaatggaattaccatatgatccaactttcctacttctggatatatatccaaaggtattttaattgatttgtcaaagatatatgtgcactctcagttaattcttaaagcaacgtactgagatagacattattagtatcctcattttacatatgacagaaccaaagcagagaatagttaaataacttgttcaaggctaaacggagaaagaatcaggattctttttaatattttcaagattcccaagttcaaatgattaaacaatctattttttttttttttttaaattgggggcttccaccttttttatatttgttgttagtgggatttaggacatatcatccccaaatatggcaccttggcatttcgggaaacagcggaagtgagaaagtctctgaccttctgccaccattttcctctgaagcagatcagaaaagaattatctggccttgctctgaagtaggccataagacccctcatgtgtcccatacctaaaggaaaggaatgtcacactgggacacagagaagactgaacaaacaggctttgctacattcccccccaccccaactttattaccattagattacacccttttgttctccaatcatacttctgccaggttgtccactcttcatcaaatttagcataaaaatacacaggtctcccctttttctttaggtattcatttctgaatgctcctgtgtcctggtatcatttgtaaaatttatattaaatacatttgtatgcttttctcttgttaacctttcttttgctataggggtctcagctatgaaccttgtgataggcgaggaaatcaattttttctcccctacattgttcacaatccaatttaagagaaaaagtgagcactcttgatgatccagtaccccccaaaacacacagacacatgcagaaataaaacaaaagttttataaaaggtggcatttttagtatatgtagccacactttaataattttatttcattcttttctatttgtttttttttttcctttttttgagatggagtctctgttgctcaggctggagtgcagtggcatgatatcagctcactgcaacctctgcctcctgggttcaagcaattctcctgccacagcctcccaagtagctgggactacaggcacacaccaccatgcctggctaattattgtattttagtagagacggggtttcaccgtgttgcccaggctggtcttgaactcctgaggtcaggcagtccgcccgcctcagcctcccaaagtgctaggattacaggcatgagcgaccgcaccagccttctatttgattttttacattaatggcagttatgacacataaacgggttgtacagctcacaaatgtcttgacctatagcttgaagagcatttgtctaaatgacttgctcaaactacttactcacaaatccgggttctaaagttaggttttttggtttaaaaactgtaggctttttcctcttggttttataattgtgtcagtccaaaaattcttcatttcctaacttttctccatattagctataaatcagaatagttgggaactaaatgggagctttgccaaaggggcaatccccaactacaatgcgttggtctaatattcagtaaaatacattgattttagtaaaattcactgcatattttgcattttactcaaattcaatataaaatagacagtttttttttttttttttttttgagacagagcttggcttttgttgcccaggctggagtgcaatggcgtggtcttggctcactgcaacctctgcctcctgggttcaagcgattgtccttcctcagcctcccaagtagttgggattacaggcacctgccaccatgcccagctaatttttgtattttagtagagacggggtttcaccatgttgaccaggctggtcttgaactcatgacctcaggtgatccgcccccatcggcctcccaaaatactgagattaccccacctggccaacagtctgttcttaaagaaagaaaattaaaataaatataattactagattcagtgtacattttacttttgtgagtatcattcaggaattcttacctcagaaaacctggaaaaggcaagttatttagaaatatgaagaaatcagggtgttttattcttaatgaaagcatgcatcttaatttatctttagaaatgactgggggaagttgattatacaatcaaaatgattaaaattaggcatgtagactttagtgcaagcaaatctgggccactcatttccaggtacatgaggaaatgtactagcacttcttttattactatagctttgaaggcagcgtgttgtcttacttcccattgtttggatttttaaactgataattaaattcatttgcatcactgctgcttggattacaaatacttaaaacaattagttttctgtcagatcacagatctacatcaaatagatgttactttttaaagaataagccctcaccaattagaatgattcaaaagcttttgattgttttctccaaattgttaagtatgcatttgtctttaatgtaaataaatagacttaatggcataaaaagccattctgaattttaaatgaatgacaaaatgtaaatcatgttctggcataatagttttgccaaagtttcaagaaaagaaataggagcattcacaataagcaattgcaagctgtgaaatggcatattaaaacagaggattaagttatttttctagttagtttttggggaaaaaatctccagtcttgcagaaatggctaaataattgcatttggtatggaggctacttttggtcaaaattatgttaataaatatctgagttcctcacattaaagtgaagcaagaatctgtggcatttttttaagtcataaaacatttgtatgttggcttttagatagtaacaagatggcatccatttatctgtatgcttctgcgcatacaaccttatatgacatatgtaccaataaaaaaagtatacatgtattagtaattaaattctagacttgtgctgtccaatttggtagccattagacaatggcaaaaaattattttgaatttaaattagtgaaagtaaaagaaactatgttgttcctccattttgctagctacatttgaagtgctcagtagtcacatggttttagtggccatcgtgttatgtagtgcatgtatagaacattttttgttttttatcaccaccaaaaattctaatggacaatgctggtttagctcttcagtattgcaaactttagcctttaaaagctatttgcaattatttagcgtgtattgtttatgctccaaaatactttcatctcaatgtagaaagaaaacgattgcacttttgaatataagagaaatcaaatccttgatttttttctacataaaaacgtggaatttaaactgaattatttaacaaaaatcaaagtaccttagaaataacctgaaaagaaaaacaaattttagataatatatataattttgaagtagaagaaaactaagataaaacgtactgcatttgtatacttttatagttttctaattattattataattggaaaaaatgaattttaacaaattaggtataattatcactgtggtaagcagtctccagaatggtcccaaattaaggttgtctgattacggaataccatgttcttttaagtccagtaatcccaaccttttctaggataaagcttggtatatggaatcaagatatgtattcttgttattcttctgttaccattactgctgtgggtttcaagaacaggcacatacagtttctccttgtgtgacacaaaccttgtgtgaatactttttggtacgctttcaaactggggcagcactagatgaatgccttttccctaggtatgcctttcagtaaactctccaggtgagaggggtgtagtaagtactgctttacatggatctaagtgacatgatttgatcacagttcaggtggttgtagttatgaaccatttcatgttaaattaaggtttaggggtttattttctaaaataatgctacttacagtgacagcatagcatagaatctacaagttctaaagcaactcaataacttctcttaaatggcccttattattttggattagcattttggatgacaactaactccactccctctcttgaagggaaagagatttggtagaaataattgaatgaatcctggattaatctagaatatgattttatcaatgactgatgaattacactgcactcagttgataacggtgtcttcttctcttagaaatgttgagtttgttcctattattatttcaggagacaaagctttttaaaagagttggtcaactgtagctaggcatgaaagcatggtctctaagaagacacttataattccctaagtatttgattaaaaggaaaacaagtacctcaaaaactcttaagtttatgttataggcaaagaagtccccaaacaatttagtcaacactctgaaataaactcttaagagtggtgattttcacttggcattttggagattccatgtgtggcaatgtgctcctcaatcaaggagttacatttctatgtgcagtaacattgcagttgcacaattaatacaaaaacaaacatatattaatcaatgacaggttttctcattttcatacagagttatgaaacctttaggctaaggaacagaatagtgagaaattagacaactattaataataggattaattagattctggccctacagctaagaaaatggagtgacaatcagaataacaccaaagttttgcaagttgtccaagtgacaaaatacaactaattaatactaataaactaaagtcaaattggactctatttacacaaagtactttttatatacaggcaaaaatttaagtagaaaaattatggcctcccagaactaataccaaaaatttaatggtaagaaaatgaacgtattcatttaatatataaccacatcatttgaaaatattgagctctcattgtaaagacatgacattttctctaaaattaatatattccataaaaatagtttttaaaagagaaaggctttgtcttcattcttttcgtgtgaaggtcaaatatcttagattggaatttaactgcaggaattatgcttctgttcttactttagcaacactaacgatgacattttctgaagtacatattgttaacaccatcatgatgaaagcaaatcatttttctacacttactttgatgctaatcagagcagtcatttaagttgctacatgactctgagacagaaatttcaaaatgaaattgaccaccgattcccagacaaaaccagaatagtggtgtcagatgagaagggttttgcagtgttttgtcacatttcattttgatttttacttttttctctgtttgacatatgttctgaactagagtgccataaagttttatcaccataagtttgaaatgaccacattactcatgagctacagagtcacaagtgagtttttagcttctttcaaagctgtagaaataaaactttatagtaccctaccctggtatatgttgttttatgtgacacattttgttccactttattcttttcttttatttcccttcattattttctttttgaattatagcagaatttgtattaaatttttcctaatacacaacagtttaagctacattttataatatcttatgtatttttttcatacagattatctttgacctgtaatgcccatctcttaaagaaattttagatggtcattataaacaaggttcattgtgaaatatatttctgttgaaacactgattttattacaaaaaggtaatgtttgatttccatgagaaccaaaactattggttgagatatgaaagatgaacatttgcttccctttacacaattgattaaaattcttaatgcatacatagtcacactacacaattagtgtagtacatacatatccgtataacttgagtcttccatgtatatgttatgcaatagaacttctacaaagacatcaatatctcatgctgaaactatccaaactataaaatgattttaggattagcttatcccaaagggaaattgtgagcaatgtggctggcctgacagcctgaagtgatatgctcagagtggatctgataggcagccattcatttcaagctcaggaagcaaacttattattttgtcatacacggtcgtttttccattgaagacattaagacggtaaagaaagtcctcagagtctatggaaaggatcaccagactttcattttatctccagatcttgaactggagcttttgaagattccattttagtgatttctggaaggctgctaatcttaatgaataaagtcagaaacacatgtgtgtggctgattcagattccagaaagaattttggttgctatcatgattatttttaaggcataagtgattaacgctgagatatactgcttttcctatttgtggattaaatttcttctatcggagaagttctaattgaaatgtctccattcaatgtggttgtgcacacacacaagtacacccatgaatgatattttacatatgtaaaaaaagaaaaccgatattaagtaacttctacttttcattatgagacatgctgtgtgtgattttatatatatatatacacatatatatgtatatatgattttcctgtgttttgttaatcattttttatcattttataatttttaccattttcatcattttttattgtgtggctgatatatactagatattactcactcagggaggatacaccctcatctgggcactcttttatacaagttatggcttttgttttaaataattcatctaagtttaatgaaagaaataagtgactgctttatcctagagaagcagcaaagagattttgttcacctgtgcctttagagactacatgacagcctctacaagtagcagggtagaatcaggttgattataaaagccttcatttcatgctaaatggaaaggagaaaagaaagaattttctcctttaattagaatgtggcagtttaatgacagaggcactattgttgtgggttaacatggaatgaaatcaattaaataggactatgtatacttaggtgtctgtaggaatcaccaaaaatgtaactctccaacagtttgctgaatctgcctctgttttgtctggctgctatacttggtatgtgggccatctggctcctggattccagtaaggtttgcatattcacacatcaatcagaagtggtgtagggcctattaggaagcaccagccagttaggtgacatgccaggactgcaaagcactcaagcaggaatgccaagtggggagcttctgctgaagctgacgctgacacgggcattggaggcaccttttgatccgtctagctttactgttgatgtcacagtcctgctagatcaggcatagggatgtcaggtcacgtaaggcctcatttatgtcattggttttgcctggataattcaaatggagcaaaaataaaagtgatcttgatccttaggtcccatgacttttgatagtagaaggatcattgatctgaaattgtcttgcattcctgactagtagacagaaagatatcagaagcaactttgtctattctgtttctagaactatattgtgggtactagtttttcacagtagtactagacatttcagaaacagctaccgaataatctttccaaataaagggaaaggttgtaataaaatgcattcccattccctatgtcttctcaaacagttcactgaaacttaaagggatgagcacactttacaagaaatgcaaataaccttttagttcactgaaataagataaacaacacatgtgtgtatttttaattggaagctctatcattcagttccttgaactaacagctactatacttttcttttgatgtatgcttcacagatatccattgcaagttttagattgtttgcttcaatgtagataagacaaattaactgaaaacttaaaaagcacctagaggattggttattttaatgttttttagacctctggatgctttgatcccatacagaataggatgaaattccactataatggcattgttttaaaatttgaattggccgtaatgtgttgtgtgtgcacacatttatctagctatgaacacaattaatactcactgagagagctctttaaaatgatgacataatttttttctttgaaaagttatttcttacgccctaaatttctaaagtcaccaaaaaaaggtaattttctatatgtaagacttatttatagtaactaaatttctaagtaactgatatctcctaaacagaaatgtctaataacttacttctagatcagctttaacaatggttttgatttatctaacttagtgcagtaatacaaatattagtagtaaaataatacaagtttaactaacttggtataataataggaataatataattgctcatgtttgatgtatgctaactacttggcaccattaagtacatcacatgtattatttcacttttctcattaaaatagcagtgtgatgctattatctccattttacagagagggaaagtgaggcatggagagaagtcgcaatttagaaaagtaataagtataatacttattttaattttaaattattctttgctagaggaaagatgcatgttccttggacatcttctatactttaataatattatttctatgtttctagcaacccccacaatgaaaagcaaatacacgatgcctttgggggacaaagcagttctgtagtcaggcccacacatgaagtgttttacctttataggtttcaacaattaattggaataagctattttttctgttttggcatctgtctacttggcaaggcccccaactgtggtgttggcagctgcatgacagcgactgcctctggtttttccacagcaactggctgaaactcgcctccctgggctgtcctattatgttgaaaattattttctttgactcaaatcagaagagtgtaatagaaattgtgaaaattcctgacatcttcccaaagatgtttttgaaataggttaaggttctccgggagtaaacttggattctaaatatgattttttttttctgacagatgtatgcatgtgttatggtaggtattcagaaatgaatgctctcatttgtaaaataaaataaaataatcccaaactcttaactatagcaatttgtggttttaatcgttttcccttgtaaatggaaacttggtaagttttagagtgcattgtacatgataaaatacatcttatgtctaaaatcttagaaaatattatcttgcattggggaaaacatcataatagtgcatatgtgattcattttatgtaaagtcctaaaattatctaaattaaaatatctatattctatagctgtgcatgtgtgtatgcacacacaagaatatacacatctgcattttatatagatacaagtatattgaaaggatgatacattcttatacagatgtagagcttaggatttctttatcaatataagatagaaactgcgaaagcatgaaaatgaaattaagcatacttcctttattcacttatcacccgttttcagaattagttgccctatgggtaggtaccttttaaattatattgtacatctttcaattaaatatcgggaggttgaaaattaagtgacaattctaatatttctagtggaagacctgaagctgcactattaaaaagctagtaaatggaaggggaaggatatttctttatccatggagttaattacacaagcagtacactatgtaagtgctaggagaaaaggtgatacaaacactacttaaaaggtttccagcgagaagcagctctgaacaaagtagatttaaagtgttacctccttactcctacaaattctaatgggaatcaattatgttccatgagtaataataataattaatatttatggaagtgcttactatatgcttggctctgaaataagggcttcacatattatagcacataactatcctaagtagaagatactatttttacttccctttttatagatagggaaagtaaaacacagaggtgggccgggcacggtggctcactcctacaatcccagcactttgggcggccaaagcgggtggatcacctgaggtcaagagtttgagaccagcctggccaacatgacaaaaccctgtctctactaaaaatacaaaaattagccgggtgtggtggtgggtgcctgtaatcccagctacttgggaggctgaggcaggagaatcgcttgaacctgggaggcggaagttgcagtgagccgagatggcgccattgcgctccagcctggggaacaggaaggaaactccatctcaaataagtaaataaataaatagcacagaggttaaataactctcctacactcacacactccatgtgtctctggtgatcacttggtaccacttcttttcttgcatgtctcacctctcttataaacacattaccaattttaaatgggtgttatgaactatgtgtattaattatggctgagaaccaccatttttaataacatggaattttctttagctggcagggaaggaatgcttccagtttaaaaaaaacggtaaaggacatagctttaaacagaaaagacgctttgaagataagttcatgtccataaagtccattcaaataacttagtaaattgctgataaggtcatatcatgtagcattttttaaaaataagattgctgaaagttcagcttgctctgagtaaacacagagcaagatgattctcaattatatagtgaataaaatcaataagaacatctagtgaaatccaaacagaaaataaaaaaatcaaaattgacttttaaaaaaattgacattttatggagataattgtagatacatatacagttaataagaaataatacggatatcctatgtacactttaccattttttccctaaagttaatattttgcaaaactataatataatatcacagccagaatattgacattactacaattcagcaattttattcagtttctctcggtgttcctatatgtgtgtgtgtgtgtgtgtgtgtgtgtgtgtgtgtgtgtgtgtgtgtatttagttctgtacagtttcatcacatgtgcaggtgtaggggaattggatatcacctccaatcccccttttagttcttagtaggctcttcagttggatctagaaaccaaatcgacatcaggcagaaaacaaaagaaaagaatacaaattgtattacttatacatgtacgtggagatcatcacaagaaagtgaagcctgaagaagtagtcaaagcaagatgcttttaatgatgaatgatgaatttgatgaatttggaaagcaatgacaggataaagagaatctggctagggacagtaaattttctctaggggagtcactaggagatagatagtgggtataaaactagtgaaagataagggttacttcagtaaatatatttattcaggtccattgaagcctccaattctaagtctctggtaataagggctattttctcactctggtcctgtgagggtgcccctcccagaggaatctttatggtttgctgcatgtaggaagagacaggtgagctaactctttctgaaactacaatttctccaaagtttccaactgaaaatagccaacataccaatctggcatatttggggatggaacatcctttactccttcacaggtatctgtggatgagagctgaagcaggcccaccaggaacagagagtgtttccccttactgttggcaattctctggattgcatctacccatcctgtcctagaaagtgtcaggagaacctgatgttgtctcagggaatcctcttagatgtggagagataagcctttctaggctgctttcgactgctggttgtgggtctcgaaatggtgagtctgggtcacttgcttctattaagtgaaaagatgtaagtcactcaacttctgctccagacccagtaaaccaaaactccgtcgtcttcttctgactaccttcagagttatcttgggtttattcctgcattattaccagcatttgttgctgttttagtgggaagaggaagggaaaaatgggtcgaagttatcttacccttaccagaagttcctaaatagactttttcatgagaaagaatatttttaaaaaactgtttatattataaatattcttggtagtttttttgctgttacatattttttaaaaatccatagtgcagatataataaaaactattgcaggtatttaaattaacagaactagttgaattcctacaacgtgtcatgtacagtgctaggttggttgatctgtctgtgcttctgctttacttggaatggatgagcaaaggcttatactaatttgcacttagtattataatgaggtgtgagaaaccaattttcatattcaagtgtctataaaaagtgactatttttcaacagttagctcctttaattataaaatcagtttttattaaaggcagttgatgctttgtgtgttgttgctagggtgacatatattatagaaacatacagtttatctttccagtaagagggaatacagtctctatcttaccgttaatactttaattagagaatgatcgacagaaaaatcttttttctcttcatgagatttgaaaaatgcatatcttctttatctgcatttaatcaaccctgggttcattaggatttgttgtgttggcacctgagaacatcttagaaattattaaataattcattttctgctttttttctttattttttatttccagcagaggcttgtattaaggagattctcttttgacatacccccacatacattcacactaatatatatgcactattttcaactgacatgttttagagttattgagatattaattttataggatactatcacattttatagctcttagtaaatagtatggtatttcaaaacataatttagttatagtaatagaaataatccatcatatttgttgtatttataaaatgtcttcaaaaatatcatataaatgatatctgaaattttgtcctagtcttgcaaatgctaggggattaatattaataaggttgttgtcaatataaatttctagtgagatgctcattaactggaaatccagtgctagagagacatttcagaatacctaaaccttatttagagacaaataaacatactagttaatatggctattgctatgaaccgcataaaattgaaatttgcccgaactcattcagctaagcatgctaacctcggctttggaaaagattgaatggcctatcatcagtcaatcttggtactagagttaaaagaagaggcaagtaatatggacagcacaaggaaaatgacagaaatagcggcttgtgatgataattagcaagaagtttgaataagcaaactctaaagaatattgaaaatgagacaaaaactgttaatgtatatgcaattaaatctttggaccctccttgcttgttgtttcaaatatccaattgtggagagaactacgctagggtaataatattgcccgttttccctgtccctccatgtactccaattaagaaagcagaaatgaaccatctaccctgatttttggaggaggaattgagtaggtatggcttcatgctctttaaattggggttaagcccccatgatataaattatatagggaatgcttcttcttccatttaatgcttactaatggatgtcactaggcaaattattagcaaacatacataataagaagacttaatgctatgttcgctgataacagctttatcattagtaaaggagatattttcatctctattcgtctgactcctatatgtgcggcttaattgattacgaacctaggtggggaatagatttaataattttctcaaactccatctataagtaatatgaagacatgataaatttttaagcagaaaaatgaaatgaaaaatattatgattcggaaaatttgtttccttgtactatgaaggatacttgggagcaggttggagaagagggtgaaggaaccgtttgggggacgcgtcagtaaaactggtggtagagactaggctgaaggatgatagtgggaatggaaaagtgaagacatttgaagggaagaagacattgtgtcggagttctaacgatgttcatttgtgcataaaacttgcatttgtctatcttattgtactttatatattcttcctaataccctgtactccattttactcctttttttttttttttttttttttttgagacagagtctggctctgtcgcccaagcaggagtggtgcagtggcgcgatctcggttcactgcaacctccgcctcctgggttcaagcattcctcgcgcctcagcctcccgagtagctgggattacaggcgcctgctactacaccagcctaatttttctgtttttagtagagacggagtttcaccacgttggccaggctggtctcaaactcctgacctcaagtgatctgcccgcctcggcctcccaaagtgctgggattacaggcgtgaaccacctcgcctggcccctgtaccccattttcaatatggcaaatggaataaatgtttttacaacatttatttgactgttgtttataactcttcaatagctgtccattactgtaaagtttatgccacaacctatagggctctaccttttaacagctatctctttctgattttccacttctctccaacctccctccctaaattacggtgatactgattttcttttaaaatacaggactactatcagcctcctttttcatcttttaggccacaacttaatgtttcttcctcagagaaatttctaaaggacccaaacccacaatagcttctatatgagactacttctcccattatatatcttccaggtatcctgtaatctcctttacaacagccagcagaattgaagtacactatttgtcaaccaaaggtgtgaagcttcttcttactcctggtgtttgtggttttattgactcttctttgttttctttaccagtgagatcccatctacatctttcagtattttcaccagtatcttggtcttttgcttgcttgctttcttgttttctaggttgattataattttattcctctaaacacatgaataccttccgtcattccaatggaattttggacaaaagggaaaaagttataagtgccaatttggttgccatgaaccaaaacagaaaattaaatacaattgcctagataatcaggcccaatttgtattacctagtatgaaaaacactttggtaacaacagtaggtcatgttaaactaattaatttctaggaacattgataaattaaacattggttactctccagagtaactctaagcccagaaaataagtgacttgtacatccatcatctgattcaggttcaaagagagtttctttattttggcaaagccaactttactgaaatgagatgagaagatttctgttgccaatttataatggagattaaaaataagaccccattgtcagagttggagatcatatgttggtaattgtggttttgtacaaaattaagaattgatccctaagaacttgtaaattataaagactttgtttagctcagtcacatttgcctaatctaagatttctgtctaggagaaataattttctagatggagtcaactagtacacctagtttaagtcttctttatgtgagattgtgtttaaaacagtgactcttttggccatagttacaatgagttcttcaagggttgtgtatttgcagactatcagtggaaagcacttgaatggcaatagttggaaattttgaagcaaaggaaataaaattgttacttgaaaccttgtaaaaagatcatacggccgggcgcagtgtctcatgcctgtaatcccagcactttgggaggcccagacaggtggatcatttgaggtcaggagttggagaccaacctggccaacatggtgaaacccgtctctactaaaaatataaaaattagttcagtgtaatggcgcacgcctgtaatcccagctactcaggaggctgaggtgggggaatcacttgagcctgggaggcggaggttgcatcgagccgagattgcaccactgcactccaatctgggtgagagagtgagaccctgtctcaaaaaaaaagataaatttttaaaaatccatgcaaagagcttgctattttgctattttagggagggagcatgagcttcatactcacttggaatttcctgagataaaggcagaaatagaattggaaaatatttaatataaatctgaaaagataaggcatttctcttagaagaagtttctaagcaaggcagctatatagcaaagggtgaggtatatatccctggctgcctcttagcacagggaactggcaccacggggcctacactggcccaagagttcttcaaagataattgtgttcccacaacttttctctgtgtagtaaactcttcctgccctgtagcagtccgcccagttcatgaaaaccatgggatttgacccactgaagaagacttttctcttaaagtttttcctgtttatccaggttttacccagtaaaggtcagctataactggtaatagttttgtcaatgtttccataccttgggacaaagttccttatttgctcggtatttcctctcaagttttacttggcattttgaaatttgaaaaaaattctatgtttttcctggctgtgaaaatgtattttttctttagtatttgatattcaatttataaaataagacttaaagcagctagatatttgcccatcgttatgtttagtggaatgaagaactaatcagctactactagtcttgttccaattaacattctattcctccatttccttcccacactgatatatgtacatatatagatatcagtgtgatatatatatatatcacacatacatatgctcatatatacatatatatcttatataagtctttgacctttctaagggtcaaacaccatgtttttcacaatctaggcaagctgctacaaggaaggaagagtctattatacacagaaaagctgcaggagcacaattatctttgacaatacaccttatattggtattttattttttttctgaaattactctgggttgagtcttatatttagtttctaattgtgaaggaaagccctgtaatgacctggtgatccatcttctttagaaccaagtcggccacagtcctaaaataaacatctgaaggcataggaacatttacagatgaaaatcataatttaatcaattgggtgtattatcttattttctaaatatgtatacattatttctttttttcttttttgtgagatggagtcttgctctgtcactcaggctggagtgcagtggcatgatctcggctcaatgcaacctccgcctcctgggttcaagcgattctcctgtctcaacctcctgagcagctgggactataggggtgtgccaccatgcccggttaatttttgtatttttattgtaacagtggagatggggttttgccacgttggccaggctggtctcaaactcctgacctcaagcgatccgccccaccttggactcccaatgtgttgggattacaggtgtgagccaccacgccaggctaccgtgtttcttttaaaaactttttttcttctatgtaccgtataggttttaaccctgtaagactgaacaccctcttttgtaagacatattttgtaatactcccattactatcctcaaagagaatttaccaaaaatgtaacttacatatatatataaaattctaaaacaattaccttgtaaaaaataaatcaaaggacaataatgaattaaaaataatggatatatttatcatcaataattaattattcaatatgaaaataagaaaggtacatactgctctagataaatgtagtacctgtacctaaaaccacagaagtagacagctcgaaatgctgacgtatgcaggtgagtggtatgaatgattaaaatgccatgaacagcatattttaaagtaatgggatttttctgtatgattaataacatttggtaaagttctgaataaaataagtgcacattttccctttgatttattgtgggatagtttcattcttggaaaatgcagtgcatataaagactttgtatttatatgtaaaattgagctaggttctatatattcacatacttataaacaggctgtcccctacttttcaaaagctgaataggacatgaaacaattactcattttcctggactttcctgcgtgttactggatgtctggcgtccttagagcacctttccatccgttatggggacaatcacagtgctttcacgtttcttaaatgtacccagggtatggtggtgtgcccagttgagaggaactgcaagtgagggttgtatttttttttttttgagacgagtctcgttctattaccaaagctggagtgcagaggcgcgatctcaattcactgcaacctccgcctcccagcttcaagcgattctcctgcctcagcctcccgagtagctgggattacaggcttgcgccaccacacccagctaatttttgtatttttagtagagatggggtttcaccatgttggccagactggtcacaaacttctgacctcaaatgatccacctacctcggcctcccaaagtgctaggattacaagcatgagccaccgtgccaggccagggattgcatttttgcatcgaagtagcagaaactagaaccagaggattttaactttctcatatgatggaatctgaaggaatggagtctaaagcaagaaactggccctgtgatggcatgaaaatcccaggcccctttgatcttcttgctcttttacaccttactatcattctcatgcttgtcaactcttggttgcaagatgatggtttcaacatctccagcctcaagtcttacatttcagagcagaaagatgaaaaaggaagcaagaagaaggaagaggcagcatgtacatcaggaaaacaaaactatcccagaaatccctagctgtcgtcctctcagatgccaaaaggccatgactgggtgccagagatgcttgaaatagagctctttgttcttgcttgacaccttgctacttctaaacaaaatcacgattttgttgttgagagaaaaaggactcctccctatctacttgtcctgagactgcttcagcctctcagcttcctagaccctcatgcagttgatttccaattcttccaggagctggcttactgtctactttttcagggtttcaaaaaaaaaaaaaaaaaaaaaaagcattttttaaagtttaaaaagcaaaatgtggagtgaatattttttggttactatgctttttaaatttttagaatttgtttttactgtgggttggctgttaatagtccatcaagacaactatttctttgctgggtttattggatattgggcaagcaaacaagcaaatagcagtatctgccactggatgtaatcaggaagaaattttcagaaaaaaaaaatgatgcttcaaggtctagataagcagattttccactggttcctgattattctaaataaaatgtttagtcagtggttgtgtaagtttcaaggatgttatagatggctcttgaaaacaataacacattaacctaatattttcagtactcctttttctagcttcatttatcctctcccatgcctgtaaacatgttactttgttaaccaaataaagtcattaatacatgagaccattttgccaaaagtaaacttaaaattaggaggaattggtctttcagaaggcaagaagagaccaagatgaaaggaagtcatttttgtgaaccatatgttttgacccagaagaactatttcacagcctttctcctggtagcaaacaatgagggaaacagtttcttaccatctgcacaataaaacttgttgaatcactcgggaattgggattattgctactgtttgtttgttgttaagccttaaatttaaaaaaagacaggatatataagcagggttggttctaatactgaaataaaacaaaaatgaacaaacccagagaaatctgcttccaaaaagccacagcacaacaaaaagaggtgtaaacatcagaagacctcaagggaaaaatacgtttatttagaaatgggatatcctggggattttgttacagcagctttattaagatattattcacatactgtaaaattcactctctagaagtgtacaattcagtgttttttcagtatgttcacagagctatgcaactatcatcactatctagttgcagaatactttcatcatccccaaaagaaactgtatgcccattagcagtcactccccattcctctctccctctagcctctggcaaccgctactctgtgttgtgtctctatagatctgcctattttggacatttcatataaatggaatcatactatatgtggcctctagtgtctgtaatctttcattttgcataatgtttttaaggtccattcatattgtagaatgtatcagtctttcattccttttatttgctaaataaaatttcattgtatggatataccaaattttgtttgtccatttatcaccagtttacgggtattcgtaaggcttttttttcccactttttgcttccagtagactttttgtatgtcacaaatggccatatgtttctttatcccataatcagaataaaaattatcattcttttagtggacgtgcctttttttaatcaaggcacagaaataaaaaagtgagttgtattttctcattaagaaaacattttggggtgtgcatgttttcagttgtttggaaatatgtagacatattggcagggtatcccacttacttttgctgtgtataaaatcaccctgatacttagcagtttaaaacaattactttattatgccgtggatgctgtgagtaataaattcagataggacacagcagggatgttctgtttatgctctgcaatatctatagcctcatctgtcaagacttgaaagctaagttggactcaatggctggagggtggaattctgaaggcctacatgtgaacttgctatgttgtttggcttcttcctagcatggtggctttacgatactcacacattttctatggtaactcagggttccaagcaaacgctgttctagcaaacaaggtagtagtcatatggtcttttatgaccctgccatggagggcacaaaacattactcttgccatcctctatctgttgaagtagttacaaactcacccagattgaagaggaaaggacatagaccctacctttccatttgccaatgagttttgggaccatattttaaaaccattgtgccataaagggcatgttttatgacaggtgaagctttacgtcttaaaagtatataattacaaatgattaaatttaaaatcacgagaataaaccattgcattcatctaccatcttgccactaaatcagaatcagtaaaacaaggtcaaattgactagaagccacatatagttgacatttggaagaatttgacagaaatatggctcaattggagttactgaatttaaaccaaaacgtttggcaccaagaatcatgggagcccagactaaagaggaaacatacattatatagctcttattatctaatggtgaaaatcctatcaaatctccacaaaggtggtgaactctggtcttccatggcatcctagacaaactttatttacaggcatgtatggtatataaaataggcatagataataaatataataatccagaacaatgataaaacagctactatgtcaaggtaccatcctaacctcacttataatcaggcattaaattctcataagaatcctatgaattagacaccattattatccatatttaacatatggaaagaaactaaagtacggagatgctaatgaacttacccatcgtcccactaataaatgttaaagtcaggatttgaacctagatgctcaggctccaaagcctatgctcaaaactcttgctatgtgaatactggcatattactgaataaaatagccccagttttgtttttaaataaaaaatgttgatcaatttttttcaataaaatattgtttcatcacaataagacctacttattttcctcctgagcagtttttagtgacatcaataacaatttttttaggctgggcacagtggctcatgcctgtaatcccagcactttaggaggccaaggtgggcagatcacttgagctcaggagtttgaggcaagccagggtaacatggcaaaacctcacctctataaaaaaaatacaaaaattaacagagcgtcgtggtgcatgcctgtattcccagctacttgggaggctgaggtaggaggatctcttgagcccgggaggtcaaggctgcagtgagccatcattgcaccatcgcactccagcctgggctacagagcaagaccctatcttaaaaaaaaccaaaaaaattataagcgagtcatacaagttcttcacagcttttcattatggtaaaccttgattaaaagccaaggttataaatgtaatttttgctaagtgcggatgtattgtatctgtagcaaactgtaattcaggcccctgaatgtaacatcctagctctcattccttttgctgtcagatttccctatagataacgtctacatctgctaccttatctactcgcaaatatttatgattttcttccatgaaatttacttttctcccctgaacctgtaagccaaatcaagtgaccttttgtgaatctcaaacctctgtgaattttaggtagatttaatattcttggccaccactttctattcagtcaaattcaagaattctataaagttaaatatatatggatgtgtgcacacatatatatatatgtgtgtgtctctaggtcatgaatcttttaatactatagaacatagaacatagaaaattataagagaaattaaaatatattgtcaatttaaaagcataccgaaaacatgttatatgagaatggaataatacaaattattggtatggggagaagaatcatgaatagtttcatgaggaatgtggcatgtgtaacaggcattaaatatgattaagaactaacactgagtatatacaagttagctgtatcaataaaaatgtaaatcattcagcaataaactataaagttatttttactccataagggtttttttccctgaaattttcggcccaaagtgactgttttttcttcacatgccacttatatagtgtgaccaagtatttagttaaaaaaattattctccagtcaaatcatttgttgtacacttcttggagctgtggcttgcttgtgtttttattgattaaaaaatacagcacaatcttgcacctaataaaaacctaacaaactggctgagtgcggtggctcacgcttgtaatcccagcactttgggaggccaaggcaagcggatgactggaagtcaagagttcaagaccagcctggccaacatggtgaaaccccatctctactaaaaatacaaaaattagcctgacctggtggcaggcatctgtaatcccagctactcaggaggctgaggcaggagaatcacttgaacccgggaggcagaggttgccatgagccgaaattgcgccactgcactccagcctgggcaacaagagtgaacctctgtctcaaaaaggaaaaaacaacaacaataacagaagaaacccagtaaataataggaaaaaagtgaatatagaaaagtaatagaaaatggttgcctttgtgaggttagatgtaaccaaaatattttagcaattgtttagaacaaatagattaaatgaaaaatatttccattaatattttaaactgttaaattctgtctaatttcacatggtagatacacattcattaagacttttcagtgttaagactaaataaagaaaaagaaaattcttcttattgtgccttattcagaatccactgaatttcgttattatttttattatcattatcattatcattatcagtattatttgagatggagtctcgctctgtcacccaggctggagtgcagtggcgccatcttggctcactgcaacctccgcctcccgggttcaagcgattctcctgcctcagcctcctggggagctaggattacaggtgtgcgccaccatgtccagctaatttttgtatttttagtatcttatttttgtgggtacacaatagatatatatatttatggggtacatgagatgttttgatacagacatgcaatgtgaaataatcacatcatggagaatgggatatacacccctcaagcatttatccttcatgttacaagcaatccaattacactcttttagttatttttaaatttacaattaagttattattgactatacttaccctgttgtgctatcaaataggtcttattctttagcaaagcatatttgtaaagagtttggagtttctctttgctttacacactgtaaaaaaaaatgtcaaacaaggttatccaaagagtagtaggagaatgagcattgagatcataagtgtctcatctgatcaaagttattcaagaatgaatgcattttggaggcaagagttgaggaccatcgccatcattgactatggagtaacacaagcccagactcttgagattaatttggcattatctttcaaaattaaaagtataattacatatttacatagcaattctacttcaaggagtttgcccttcatttatgttttcacatgagtaagggtttagatggacatgggttttctttgtagctaggtaatagtaaaataggtaatctaaatggacatagcttggtggtagtccatgcctgtgccctttatactacagttttaaacaagagatgaatttatataaacagatgttgaaatgtgatcgttatgtagtattaattgcacaaaagtagaacatatatatgtgcatatgtatgcatacatacatgtacatacatatgtgcatatgtgttctagtttattatatatatgtcaaattgttctatttgtatgaaaacactataaatacatacataataaataaacaaatatgcgtttgtgccaaaaagcacagaacatttctgtttagtctcataccactcattttatagctttatagataggaagaaggtagactttgatggtacttgaatttttatctatgtatctgggcaagtattttatctatgtatgtggtagcatattttatctatgtatgtggtacatacatgttttatgtatatgtatgtatacatgcatatatgtatgtataaaatacatacatattttatctatgtatgtggtagcacgtgagagaatttttgttaatttatatgttatttcacttcaaaaattgataaactgtgtgtgtgtacatatatgggtggtggctatatacatatagatattatatttctgggtggtttataaagagcagaaatgtgttgctcctagttctagaggctggtgagtccaaaagtcaccagcatgttaggtgtcttgtgagcccgcttcctcagtgacgttcatcttgttgatgattcctcacatggtggaggggaaagggagcgttctaggttctttttttttttttttttttttttttttttgagacagaatctcattctgtctcccaggctggagggcagtggcacgatcttggctcactgcaacctctgcctccgggtttcaagcaattctctgcctcagcctcccaagtagctgggattataggcacccaccaccacgcctggctaattttttgtatttttagtagaggtggggtttcaccattttggccaggctggtcttgaactcctgacctcgtgatccacccaccctggcctcccaaagtgctgggattacaggtgtgagccaccgcgcctggcctgtaggttctcttttacgaggcaactaattccaataatgagagctccatcctcgtgacctaatcacctcccaaaaagccccaaacccatctcctaatactatcactttgggagttaggatttcaacatatgaattttgggtggacacaaacattcattcaataacagtgactatactatcctatgttaacattttactattttcaaagcttttgttcactttgtatatatgcatttatttatctttgtagcaaatgaaggataaaaatatcttttggagtattatcttgacatactctccagctgctagggatgacctgtcagtattgaccccttgggctgaagcaattcgatcctctcaaaactcaaattgaagtgagaactatctcttctcctttatttcctttcaccagaaatagctatttcatgttttaaaacaactggaaggtaactgaaaactttcagtggtgttaaatcactgtcagaaaaaaaaaaaaaatctgtttgaaagttggaaacagctcaagtaaagccatttaatctgaccagcataagcagattctgaagaaaatggtgaagaatatcattagcagcaatgcacacagtcatttattcattcaacagatgaacatttgatgaacacttactggttcttggggactatactccatgcctaaaatacaaagatgaacgaagacccaattcttgctctcaagaaaatgatagtctgttaagaagaatttactggaagatagataagtataatactgaaaagtgtgaagaatgaaacaataagatgtgcaaagtacagtgctgtcacaaaagagagagaaataaaagctaactggacaggtcagaagaggcttcacatggcactgtcttgaagaatgcatagaaatattctacaaccagcaacttccaattcagttgaactatctccatgcttcctgttcaaccgagattacattttcaatcttgtttctaaaggaaggaaaaaaagatgagtcatttggtacaaaaaagcaagaacagctatagtctacactataagataaatgtagggtactctttaaatctagtggacgctgtccgtaccctttcagcgctcccattttgtctcatcatctaattgcgtgcacctgaagactttctctgatgggtttgccactgcggggaaggctagaagtgctggaatattgaagacccaagcagcattcttcaggttaataatagatgagaattggatgataaaaactctaaactttttacactcaaataggatgcatgaggcatgtctatttcatttgctagaagtctccagtggcattaagtcccagtcatccatagtcataacttgctcattaatgtactctgtgtgttcctttcttctctatctcacttctctacttcctgttgatgctttctgtgatctccatcacagatcttcctgtttctcacttcctgttgatgctttctgtgatctccatcataatcagctacatggactcaaatttgtcatttaagtctgatcttggggaatccaattttagacattgagcaatggactggctgggagggatgaaagaggagacaaaggggctcctatgttcctggttcaggaaacggatgaataacatcaccagttagtgaataggcactgcctttcagtacctacgggagtgctttgttcagtacatatcctgcccagccaagcactgaagaattcatgaattttattgtaacctaaactgcctgtggcattatgaacctgtgtaatcatgggtagtgttggctttataccaggattttgctagcttgttagcatctccatgtgcatttgcaagaccttggccactcttcagtgttttctactccaatttgcatcattgtccctgcaggatgtttatcactcagacattctgaaatttggactgatgcttgacttagctctgtgattggatgcttctcccagaacctttctcacctctatcagctacgctaatgataatctagacagaggtttccctccacgggtgctgcagctcaaactgtgccctagaccactgtcagtcaacctcttcaatgccactgtttggtgctttgcttggttctttcagtctgcatgaagtcgcagctactcaacttacatccatgaagcagcaaggggaaacttcccattctcagtgttttaatctgttctctgttataaaggaggcatagtagagttgctggaccccaaagagtgacttgtaataaaataattctttaaaatgtatacatagatcttgtatcccagggcacacatttgacatgaaaatggctgttttggttgtaagtgcaggtaacagccatcaaggtgtacttgggactcctcctccactccaaatcttaggcctcattattatttagtttatcctgtctgtatctgcaagatgatttttacgtgagaacactagacttaccccttgacactgtgctttttgcagctcctcatatttgatgggcatgaaagctaatatgttgtctaattatggagagttttaagttattaattttatttttatcaggagatccttaaccccctatacaaattagatctaaatagatactaaaagatgaagttaatatttaactcctttacccaccagatgtagctgaatctttgcattggacaagtgagaatcctacttactctgaatcttagatactttgctttgagtatgattcaatgtcactgttgctacagaagtataaatgatggttatttatgcttgcatgttttccagaaagttaaagactattttattatattggctttctgattacttgactgaagttcataaactaacaaataaaaatctaaaaacactctctggggacctagacaaactataatgattaaagcatatagttactttgaagccaagatgaggtaaaggggataacttaagacatatttattcttaggctgacatatcttgtcattattatgttacaggtgcacatggaccatttattttttctcttatgaagaatttcaaacatatacaaaataaaaaagtaacataatgcataccatacactgctcattagctctaaccattattatcattaccatctggtttcctctctacctacccacttcctattctctgttttgaggcaaatccccgaaagtatatcacttctactctaaacatttcagactgtattcccaagtaacccccccaccccacttcttttttttttttttttgagacagagtctcgctctgtcacccaggctggagtgcagtggcacgatcttggctcactgcaacctccgcctcccaggttcaaatgattctcctgcctcagcctcccgagtagctgctactacaggcatgcgccaccacacccggataatttttttgtatttttagtacagatgggatttcaccatgttggtcaggctggtcttgaactcctgacctcaaatgatccgcccaccttggcccctcaaagtgctgagattacaggcgtgagccaccgcacccagccccggaaaatatttgcttaatatcatcaaatacattttatatttcccaaattatcctataggactcctctcttctctctgttgtctctgtttcctccacaccctacatcctcctcctccctcatcctcgttctcactctcccttttcatttttgaagaaacaggaccttttgtctaggtttgttgattacatccacatgatattgtttaatgtgtttcaccagctcctgtggtgctgacaaattagcagctaagtctagagagctacttgtagtcagtttgattttgttctttttttactcaagatgattgtatagaaagtgttgtgtactttcaacaaaaggtatataacgtttgatattggcagccattgatgatcattgttttgattgattatttcattatgagttgcaaaacaatgatatactgtttttacttcttcatttgttaggaggagcagttctataaagagaactttttgttttgttttgattttttgtttttgagacagagtcttgctctgtcacccaggctggagtgcagtggcataatctcggctcactgcaacctctgcctcccaggttcaagcaattctcctgcctcagcctccctagtagctgggattacaggcgcacgccaccacgcccggctaatttttgtatttttagtagagatgggattctgccatgttggccaggctggtctcaaactcctgacctcaggtgatccacccacctttgctttccaaagtgctgggattacaggtgtgagtcactgagcccggcttataaagagaactctgcatttctatttggttgcctcatagtataattgatacaaagcaaagcagagtaaatgcttcagtttttcccccaaaagaacaattttcaaaataatgaattgcttctctagtctcttccaaaagttgccagtgaattttttttttttttttttttgagatggagtcttgctctgtcaccaggctggagtgcagcagcgtgatcttggctcacttgcaacctccacctctcaggttcaagggattctcctgcctcatcctcccgaatagctgggactacagacgcgcaccaccacgcccagctaatttttgtatttttagtagagacggggtttcaccatgatgttggccaggacggtctcgatctcttgacctcgtgatctgcccacctcagcctcccaaagtgctgggattacaggcgtgagccaccgcacccgaccaccagtgaatattttatttatttattatcatccagttgtttgttttggcatcactgcgaatgcatgaatttaaatatatttaaatgtaactgaggctctccaccttctgtattatgatctttattgtcctcatatttttcatctttatgcgatggaagcctcctttacattgacctcctgagtcctttctgtatgacctttatacactttggttgaccccaacttctcttgtagatcaccagtgggcattcctgaggtgtgggtataacatttatctctggattatttattcattcagaaactttacttagtaattaacatttactaggcgttaacaaggaagcagtaaagcagcaaacatgctcatttcaatatttggattaatacaatcaatcaaaacagtagttattgacaacttacttattgtgtggttagcacactcaaaatttatgcagagaaaaaagatgagagattagacctcctccttactgtaacacattttcaatctgaccagagattttgcttctgcaaatttggatgcctagcattggcatcatcaagactttcatagctatggaaccatcagatataaaatacaccttagtatgcaacctcaacgtgttcttcctcttgcaattgaggttatattaatttattaagttcattttgggataaagaagacagaatcatagttctttcagcctgttattataacactttattatcctttacctccttccaatttttgtgtctaataattcgtgtgcatgtgaactgtcttcacttttgagttttattatgaaactcaaactacaatacacatgtatgcataaatttctgtatatgtggcatgcgtgtatatgtgtgtatgtatgtgaatatataaatttcgttgaatagagtggtatgattgtctttggcctccttaattatatatattagcatatgttctagggctcctgacgcttcttgcaggcagaaggcatttccagaggttgtgtagatccatgaaggacagttatcgggtcacatctcacatcatcactgtttctttcttgcccctgtcttacactagtacccttcagggtattgtatgaaagcttcattggttcaaattcattttgtcctctagtgctactttctatgctgacaaaagcatagtgaaactgatgccctggcttgtactgcagtaatattgcctccaagcatatcaagtacaggaagttaaatcctatatattattaagccagatcagtaacatgtacccaacaatgtggtgagacatattttgttttaataaaacgatgatgttacaaattcttcaaccttcccatatgtgtggaggtgtgtgtgaatgtctgtattaatctaccccatgtctcctggatagagtttttctacaaagaaccaagctcagcttcccctagtgttaagacattttgcttcatgcttggtatagtgtagtgctactcaaacctgagtaataaacaggccagtttaaagaaataaaaagccctatgctcaaccaatgctgattaaaattatttttattaaaatttacctatagaagcacgaatataaaacaaagggcacactctttatggtgaaagggcatatagatctacaacaacaaatcatattttcaaatcaaataaaacagaagtacagaaaagcaatagaactcaaaagcataaccttaatgtgtctgccaatgttgtcttggatacattaaatggccttttataatgtgaatatagtactagctgcaatggtgcaagttattgtatttttagcatttttcaatatatgttgtgaagactattttactgcttttctctattcagatctttgcaaaaaaactcatgtatacactataatcatgttttttgccattttgtagtcctatgcttttgtgtcatcagccttccccagctagaaaagtataatattctattattgtatgctgttgtcattttcccacaatcaaaagtacaaattattaaggaaactgaagtttcggtctaaaatgtgttgttcagatgaaattatccataagaaattaaagttgtgttcttataactggaaaaagaacttaacgcaagtataatatgtgcaaaactgggatgacttagttcttgctatcattaagaggggacaaatggcaacgagacgagctttaacagctgagaaaatcttatgcctagatgtacataggcctggaaattacatagcagtaaaactgtaccttcaaatagctcaaaagcagctcataataactgcttgagattatctcagtgataaagtcagtataacatagtgttttttattttaaaaaggaaaaatgattactttctttacagtatgctaattaaaatatacaggtgattgaaaaaactattaataaaaatcagtaattttgttgagtgggattatgaatattaattatttaattaaaatttccttcaatagttaacaaagatttattgagtttctgagtcaagcattcttctaaaggctctgccttattagaatttttaaatgtatttgcaatgagtgtatattaaatgtaaaatgtatgattcaggtttaaaaaaaaatagcagtgagagtaattgaatgctgaggttaaatagaatgggtgaatcaaccataccataaaaaacttctaagtggatattatattccaggcactctttcctacttcagctgttgataaaatcaaatatttccttagagacccttgactaatgcaggaaataaatgaatacttgcctatatagacaaaataataacaacaaaagccagaaaccaagccataccaaaacgaaacaaaaacagaaaaactgtgatgacataacttatctttcaataggattttctcagaatgggaggcaatatatattttatgcttccatggtctgtagattccaacatttgtataattaacatatacaattttacaagggaaaaatactattcaacaaatacgtaaatacgttcaatgtaatcatgcagtacttcgtttaaattgaccttttttttttttttttttttttacaaatggtgcaataaaataatcatgtttaccttcttcacatgttcattgatgttggcgtgcacggttttatctatatgatgtgaccttttgagaccacatgacattcacaaactgaaactaaaccaactaaataaccagttatccaaagataagcaaaagtggacgtcagtttaattagtaaggggagattttaatcagtaatacactattataatagagaagagttcagcatgaactgaactgaactttgatttgtgtagaggtgactgggagttttaaagggagaatgagagaatgagtttgagtggtggctcattaaagtcagggaagtaacaaattacaaaaagtggaaaggtgggattgttccctgggaaacctctacgtttgctaaatggcacttaaggttaggctcctgccttctcactgtcttcgggttttgactggaacaaagggtaaattattttggcagctttgagttttctcagaaatgcaccttaagtggggctagagttatcctagagaggtggctttgacctgttagaagctatgttagtgttttttgttcaggtctgtgcaggccaaggttatggcctagctgagaagagggctcagaggagcctagctaaagtttggtcaaggggagcgtcttggtggagcctcactcctgttcaagtaaagaagacacattattcatccttctgaacagtgtaagtccatttgtcattcgattgccttttgtttactaaggactagctaaatcatcggttgagacttgctagtagagcatagttgctggatgatgcacgtgatcaggcatttaatgagaggcacctctatggaaacaaacataaaaacaaaaacttgttggagaagaatataaatcctatttgttgagtctagagggcaggcagttaagaagttttctagacattgaattctaagcatcttcagatggtagagtggtaatctgatggattttctggtttatggtttgaatgtggtgatggcataaacattaatttcacagtcatagttatttcctggaacagaacacggatgatgctggagttccagtggactttctgaatggctcttgtagcaggagctccaggcatgaaggttgcctatacgtgatttgttgtggtggtaagtcttttgaagtttatatcaagttcttgggcttcagtgtgcaaggctttttcaaatcctgggggagaaagacagctacaagacaaccttgtaggttgtcccagtagaatcagtaggttgtaggagtcccagtaaggatttgggcagtcagattttaattctcagtgatgtcaagtcaagagggaaggcaaaaaattataaacatcaatttggagagatgtagcccgatattgaaggaaaactaaacaattgagtatttagtaagagtggcaaaatgggtgagatggcagaattcagtttagtttacaggtaaatgataaaatcctcaagacaatgaacaaaattggaatctgataacccacagtggtgtgttttacataaaacacaacaaaaccggaattggatgagaagagtccctggatctagggtcatcagaatgtagctattaagagttggattctgaagccaaattcaaattaggtgccttgtactttgcgcactgaatgctctcaggcaaattatttaccttctttgtgcctcagtctattcatttacaaaaggaatcttaagagtatatatctcataggattgttttgaaaattaatgagtacgttacattcaactgtgtctgccacattgctgtgaagttattaccttcctaatatacttacaaacttcataattaagaaaaaataaaaattcataaaatgaacatatttgtaataacttattataaatattgtatagttcattaaatgtattacctttagacatattaaaaataacacacccctcatccccccccaaaaaattcctgtatgcctgttttaaagcagttctgcatgttaaagctgcatttatgatatctaagaagtgttttttctcctaaatagcaggttggtaataatgtatattgcaatcgtaataatgtaagttctggttacaatagtttatctgggtaacatgtagaagttaagtgaatgaggtaataaattaaccaataagattacctttctggtagggaggaaaaacacttctgggttgaattaatattttgtacacatatgaaaggaagaagaaaaataagaaataccatttgcaaagctgactttaataaattttaattgaatggataaacattttagttaaaggtagtaatcttaacttgagattacttgagataaaaatatatattttcttaagagacatgattgttagataacttagagatataataagtggaagggttttccattaaggtaactgatagtccttaggtaaattaaataatgggaggaacttgtgttaggaaatcaacatccgagttacagttaaattggtgggagtctttccagtgcctgaagatacagagattttcaatagaaataaggtttttctgagaaattaagtgaaataaaatgtgcaatagtgattgataagcactgtttattgaagaaacgatttatctttattcttgccctttgctttttaaaacttttattgcattttcttctatttttaatacactttgttattgaagcataacataaccatataccataaacacagatagctaccactcagatcaccacttggatcaagaattaggaacgaacatatttgattttaactgcagtctcttctctcttacgctgaaaatctatgtttctaatgacattagtataattgcttatatggtaattaccttactatatacatataatggttccaaaataacagttcttgaattatttttataaaacaaaattaacacaaagatttatagtgatttctgcatttattttattattatatgtttacagacattggctaatgcttctgatgatcaggcttctctcgattaactgaagatagccttactctgcagctgtgtatttcttattccatctggagcctatgccatcagacattatgtctgccatattttttcttctgtggaaaatcagttttctttctgaagtgcttatttttacctttggctgctgatgtagatctttcatttgttcttcatcttaggctgtgccctggctctaaaaagtgttctcactgtctctttgctttcatttttttcctttcctatccctacgcccttaaatcacaatatctgtcagagttccagaagaaagaataaatactcaaaggagtcatgactattataatagttgatagtgtttactttggcctagttgtttctagatttgtctcaagaagcaaacaaaccaaggattatatatataccatcttgaccacaaaccaagcctcagattcctctatacatatgtcttaagttaccaatacatgttaactgttataatatttctttgactatatgtatacaccatgtagatgtagactatgtatactttgcatcctgctgtttatcacatgcctggcacatattaggcactgaaatagttgcttaatacatcaaaataaaattgaatagggaaaatataatttcttaagttagcattcccctctctccacccaaaagtattaaataaaaaaacaagagtttacgatgactttaacattatgatagagatacaagaaaaacaaataagtatagtaattgaaatggtgcccagaacaccctctttgttgacactaaaagtaagttcatcagaccaaatctgtactgttcagctctggggaacataatttaaatgagacactgaaaaactggagcctgtctagaaagcaacttataattttagggacgtattagctgttttcaaatattcagctaatcagtggaaatgcaatgaagcatattcttattatgatgagaagaaaggaaagagagccctttgtccactaaatatttaaacaaacaaactttgtaacagtgagagatggccaaaaatataaaaagcttaatctggaagtagtgagttgtttttcactggggtgtgggcaggggcttcatgtctatttaaggaatgctgtgttcccatggaaaaccagcacaagacaaggatgccctctcttaccattcctatttaacatagtattagaagtcctgaccagggaaatcaggcaagagaaagaaataaagcgcctccaactaggaagagaggaagtcaaactatctctgtttgcagacaacatgatgctatatctagaaaaccccatggtctcagcccaaaagcttcttgtgctgataaacaacttcagcaaagtctcaggatacaaaaccaatgtgccaaaatcactagcattcctatacaccaacaacagagagaaatctgttccattgcatctgttgcatgcagtgcaacagggagaaatcagtaatgcaatcacattcacaactgccatagaaagaataaaatacctaggaatacagctaactagaggggtgaaagatctctacgtggagaactaccaaacactcctcaaagaaatcagagatgacagaaacaaatggaaaaacattccatgttcatggataggaagaatcaatatcattaaaatggccacactgctcaacgcaatttattagattcaatgctattcctattaaactaccattgagattcttcagagaactagaagaaactattttaaagttcatatggaaccaataaaagagcccaagtagccaaggcaatcctaagcaatttattagagtcaatgctattcctattaaactaccattgagattcttcagagaactagaagaaactatttcaaagttcacatggaaccaaaaaaaagagcccaagtagccaaggcaatactaagcaaaaagagaaaagctggatgcatcacattacctgacttcaaactatactacagggctacagtggccaaaacagcatgatactggtacaagaacagacacatggatcaatggaacaaaacagagaaccaagaaataagactgcacacctagcaaccatctgatcttcaacaaagctgacaaaaacaagcaatggggaaaggactacctattcaataagtggtgctgggataactggctagccacatgcagaagatagaaactggaccccttccttacaccatgtacaaagattaactcaagatagattaaagacttaaatataaaacctcaaactataaaaaccctggaagacaacccgggcaataccatttaggacataggaacagacaaaggtttcatgacaaagatgccaaaagcaattgcaacaaaagcaaaaattgaaaaatggcatctaattaaactaaatagtttctgcacagcaaaggaaactatcaacagagtgagcagacaaactacagaatggaagaaaatgtttgcaaactatgcatccgacaaaggtctaaaatccagcatttataaggaacttaaacaaatctatgagaaaaaaaaaccctactaaaaaagtgggcaaagggcatgaacagacacttctcaaaagaagacatacatgcggccaacaagcatatgaaaaaagctcaacatcactaatcattagagaaatgcaaatcaaaaccacaatgaaataccatctcacaccagtcaggacggctattaataaaaagtcaaaaaatagtagatgctagcacggttgtggggaaaaaggagcacgtatacattgttggtgggactgtacattagttcaaccattgtggaagacagtgtggcaattcctcaaagacctacagacagaaataccatcaacccagcaatatcattactgcatttatacccaaaggaatataaatcgttctattacaaaggcacatgcacacgtatgttcattgcagcactattcacaatagcaaagacgtggaatcaacctaaatgcccaccaatgatagactggataaagcaaatgtggtacatatacaccatggtatactgcgtagccataagaaagaatgagaccatgtactttgcaggaacatggatggagttggaggccattatccttagcaaactaatacagtaacagaaaatcaaatactgtgtcttctcacttgcaggtgggagctaaatgatgaaaacacatggacacttagaggggaataacatacattgggacctgttggagggtggagggtgggaggagggagaggattaaaaaaaaataactgatggttagtaggcttatatctggatgacaaaataatctgtacaacaaatccccatgacataagtttacctatataacacacatgcacatgtacccctgaacttaaaagttaaaaacaaagaaaagctgtggataggtttggtggacaaactaggaactggagaatatatgggaattttacaatagtctcactggagccttagtgggttttagtagtgtttcaagggccatgtgtagggtgagaagacagtggatgcccaccaccaccactaccaccatcagcattcctttagctgaatagctcactcttcatctgtttcatattgggcttctgggtcacattctatttaaagaaagagtttccactcgactctgaggtccttgaatccaaagtatctctcataggtccttggagcaatcgtattggaatttttaaaatgttgattgaatggcttgaggtgaaaggaacctgttgcacagaactagttctctgttatgagtccacaaaggtcttaaattcgataaacattgtttttactagtaagtgtcttagtatcttaaaattatagtaagcttgattcttttctatcatgttggcacagttcagttagcaaataataaaatgaaacaatgatgatatgtaggtagacatattaacatgcctttgtatggagcaaacaataagaagcagatgggacagtctgaggaacgcattaacaagagtttctgaagccaactgctgctgcacctgttaacctggaaggagattaatgcagtagaacagctactgtctttccatatttcttaccacaaaaagatgttttattacattcattgtaacctcttggtaacacattcagaatacaagcttcttcctagtttccgcacatgtctttctcatgatagcatactgtctttgaaaattccatctgctttgatgatttgggctattctatcaaggcaatataaaattgtttttcttaaactttattacaggtcattgagtttcatgatctatagtgaatatttctgtattgatttgttggtatttttattttctcttctcaagctccttgtaagtggggactagcaatgtattttttaattttccgaactatttaaaatctttgatgccaatgattcaacttaaattctggttatatacaccaatgataatattttgtatctagccgatatttaatatttatcatttttttaaagaatcattcactttcatcactatcatagagatgggacaaaaaatataaagactattttacgtatgtatgacttgcttggtaattatttgctgaatgaatgaaaaatacaaaaattgatagttttgctcttacccatcttgtatatctcttccagtgctcattttgcattatgtattagttcatctttgcctttattaagagtagaaaacgccatttcatcttttacatataaaaatgagtctggtctgatacagttactcacatcttcgcttaaatttcttttcttcttcttttttttttttttttttggtggagtcttgctctgtcacccaggctggagtgcagtgacgcgatctctgctcactacaacctccatctcctgggttcaagtgattctcctgcctcagcctcccgagtagctgggattacaggcatgcaccaagccacccaactattttttgtatttttagtagagacggggcttcaccatgttggccaggctggtcttgaactcctgacctcaagtgatctgcccgtcttggccttccaaaatgctgtgattacaggtgtgagccaccgcacccagcccagtgaaatttcaatttgaatttggaagctctactaaggtagtaatgtgaactttcaatattattagaaagctcatcaatctgaaatttaacataaggtaaagaaataaaaagcattaagaccttacttcatatgagagctagaatccatgacctgaaaaataaagtagataaattcacttataaaactataatttaaactcttaacttgtaaatttggggaaattagtggtgaatgggtttctaatatatggaacatgaagcagtaggaaatatgttatgagttgtgacagatattccacctcccacgagactgtgatttttagaatcgacgtgttataaaattgatctgaactttgtccctgatgctggaaaagtggcaacctgtgactgctctaaagtaagctaaaggagctgaacaaggctgggcacagtggctcaggcctgtaatcccagcactttgggaagcagaggcgggcggatcatgaggtcaggagttcaagaccagcctgaccaacgcggtgaaatcccatctgtactaaaaatacaaaaattagccgggtgcagtggtacatgcttgtaatcccagctactcggggagctgaggcgggagaatcgcttgaacccaggaggcagaggttgcagtgaaccgcgattgtgccactgcactccagcctgggcgacagagtgagactgagtctcaaaaaaaaaaaacaaacaaaaaaagaagctgaacaaatgctggcattcatacatggtttgagaaatagccctttttcatttaagggaaagacttactgagatccagattgagaaaacaccccatcaacaataaagtggctcaggaaaatgttttatactagcacatcttcaagtttctacttaaggctattctacatgaatatttaaaaagaggagatgtcaaatataaaagcacaagaggccccgagggcttagtatctttatttgcgttaaggtttctcataaataattctatttggggatataggctctggtatatatgtaataaatgtgagtctttttaatatcagagttacccttaggatagtaagtgtatttatttcaaagaaatataaaaataaaatgaataaaatatttcaggtacctcagatcattgcaaattagtcctcaagtctctttcagtttttcttggattatatgaataatgctttgggatagaggaaactcaccaaagtatatttctgaggactgggggtgggaaaggtttcagaaaggagaaacccatgggaagaatttttctactgactgtcaagtaattcatctcaacagaagaaaagctgattttcgatcagtttaaggtaatagaatatgtcagaattcctggggttttctttgttcaatagcccacttaacctgctgcagaacaccctaggaataacaaatgaatcataaggtagagggacattccagcacacttgttttcttcaaatattgatattttccccttaaaattatatgtctagaaaagcttttgctcggacagagtctgtagggccagaaatataaataactgtcaaatataaagctgaatcgcctccacaagattttaggaacttctgggctggggaaatgtggcctgaaggaaggctgctggtttggccactctctgtattccatcagaaaaaatggtggggtataatcagaagttgaaatgctcacagtagttttaccccatggcttgtcagctgaatattgcgacaatataggaattcttcatcgcagaaggaatgagcctccctggactgatgattttctcagtttatggtgtgtgtgacgtttttgtaaagtggcaaatagttgggggcatgagctagaaggtaactttaggaggttcaaccaaccaagtaccacctgcgaattggacaaaattcaatggacaaaagaaaacttaattgtcagcttactcccgccttttactcccgggacctagcttatagcacatggttcataaaagactctataaatgattactgaatgaatgaataagtgaaagtgcacaaatgaatgtatctctgagattttaagacacttttgtgttcatgcgtcttgcctacctgtctccggtccttctgaattcataaaaagaagaaagttcattttttctggaatgactgatcttaggaaataggaataagtaattctgatgggtagaaagtgcagtgtatgaagattcagaagggtaaggccaattaatttaaacactctgagtctatgttctaacctgtaaagaaggctgataatatttgccttctctgctatggtgttcccgaattgtgctttccaagaaatataccatcacacaatatatggccgtggtgaatacagtctccaatgtccttctccccctgcaatgtgccaacagagtgatctccctaagcatacagggtggtgcagtgtaaaggcacactggtttctgtttgaattccagctttgctacttactacctccataatgtgtagcaagatacttcatcactcacctgtaaaatgatgataaaatgatacttatttctatgagaattaaatagctgatacaagtaaagagcttaaaacagtatttggcctgttttaagtgctcaatagatcctagatgttgtcattgctgttactactgctgctgctgctactactactactactacatatttgtttttggaccctacttaatcccataggttgccacaactactgtctacataatgaaatctaacccccaagtataggatactggtttctaaaaatctagttcatggctatagttctagcttcattcaccaccgttctactagcaataccagtccatctgtatttcctccaatagaccactctatttttttttttttttttgcctctgcacctttacactggatgtttattttgcctttagtcacatatccacaaagagatgttctgggctccatatgatggagttgcatacagtgctgagcttttctttcagggacatattcagaaaggatgagtttttgattgttgtcaaatttgctgttatgctgattttttttagaactgtttgggcgactaatacaaattcatccaaagcttgttaagaatacattgtaatcatcagtatttttaaaaagcgattcttcattctttaccattgtgtttcccatcccaaggatttcttcagattaaaatattaaatgggacaggcaacactttgaatgtaaaggagaaatgggaaacactaacacaatggtggcatgataggggatgaaacacagaaagttggaaccaaaggggagcaccatcgttcatatttatgtgtaaggaaaagaacagaatgtccttgggtagtttactatttcttaataattctcctcacttttaggcaagcttgccagtttttttcagtggggatcacaaatgcctatctgtctgtctgtctgtctgtctgtctatctatctatctatctatctatctatctatctatctatctatctatctacctacctacctacctatctaatctatctatcatctaatatattatgtgtgcgtgtgtgtgtgtgtgtgtgtgtgtgtgtgtgtgtgtgtgtatgtaacgatttaattgaagcaatggtaagacattacaacttcaaaaatactgttttacttcacatacactttacctctaggtttcatagcaagacaatagatgggtgtagttttagtattatttacttttatttgttaattcaaggcactatagaaatacttaatctgtttaaaccccaaacatctctttaaaatattttatgtgacgagcaaacagaacatcatgatctaataaaaatgaaaatgtttttgatgttaaatgttgaggtaaaacttttgttcagttattataaaataatgacattttgagaacctcttatttttaattttatcgtctctaaaattgagacaatcacatcttggtatcgataatttttgatgcatgatgtaatatttaaaggactttaaaaatgtaaaatgctgcataaatattattgctctgcttaacagtgtttcaaatacatttttggaaaaatagcaaagtaagagataacatgtatctaaagttctcatcccttatcaactaaatattatgaaaaccttagcttctcttgcttctccagaatgacagattagcttcagcctaccttagactaggcatatggaattggcaaacgctctccttagcaactgcaaagttcaccgcagatgcatttaacagaaatagcacagatacaattaagcaggtagaaagaaagaatgagcatgtaaaacacctacaatattccagatttcctgctcacttaattggatgattcagatacctctctttcataatgtccaggtgaaagaaatgccggttcctcttatttctctacatcaaactaaagctccacttaccagagcaaacacaagtacaatctgttatgttttggactgtctaatccattctctgtagtttcacaagaatctggtgagcttacatggcatccagagaacagggtgatgagtaaagcccttaactctacattgtctaaagaacctgatttattcaaagaggaggcagctctctcacttcttattaacagagggtagagagtttctttcccaaggccaagaggggttttagctattaatacactttctctccctccgtccctggtgtgtgtgtgtgtgtgtgtgtgtgtgtgtgtgtgtctgtttctctcactgtcaattttgagtggggtttcaaggtttaaataaggtgacaagtctagtagaaaaatctctgaaagagctatttgtagaacattaactgactagttgtgtgactttgtacaaccagcttaaggattcagttttataacagataagtttagggaaataaattgcactgcacattgccttcggtctgttgtacctcaaatagcttaggaatctgttttctcctaaaacatcttcctggaagctgggtttccgctccaccccacctcccatgtgtttatgcattcctctgctcctccccttaactgagaatcctcattagaggcctgggtaaaatgtttcattgttagagttataatatatcaataatttacattaccttaattttgtaatttcccagggcattttgaaatgttatgataacatgaaaaatgtatgactttcctcaatgaaaagttaattaacaattgcttttattcttcaatgaacagctttatggctaaattattactagttttgtttttaattagatgactaaataatgcaaaattagaccatctttgtcctgacactgaattagaccattctttggcaactcgtgtacaaactattttcatttttaaaaaaatgtatgattctgagaacaagtaaatgcaattagaattgtctttcagagggaaagtggccccaaatgatgtcaagaagccagttttatgataaagatgtctatttttatgaaataaaagtaaggagaaaaaaagaattaatacaacttcactttgagattttatttttttaattcttgagttaggctgaaggccagatttgtaattgctcgtgtatgtgctttctaaaacttgcttaaggaaaactggatggattttctaaaaggcaattaaagatttgcagttgaaaaatcatcctccctcataagtattggtgtatacagtggtttccctgcatggaggatatgctggacaatatattgagaactgcagctccaggcaaaattaaactagtgttttttagagatactaggattagcttgtttactaatttgttaaagcagctgcgtttacgaaatacataagccttaagttttaatcttagaaacaccctttcccaaatattctaacaagctcaatggtcctctgcctttgctgatatttagaacatcacgagagtctttaaaacttacagatgcctaggtcccacctgggaagtttctaatttaattggtttaggtggcaacctagtcactgggctgtttaaaagctccccaggtgactataatgcacaggaaaggttgcaagccattgaacttgtaaacaatatagcagctcccatacaaaagcccgtaaattcaaagaaaatccagccatatgaacaagaaaaaaaatgtcaacgaagcagggacttcataaacatatgtttgcaacaacacatcattgaatatgattaatttgatatatctgttttgttataaaatgtctagaaaaaaatgtaatgtaacaaaaccagcaagcaatttaaaacaaataggaaaagatgattagtagatcatatgatataatttttagataatacaggaatcggacattgaatttacgttagatttttatagacagatatacagaaaaacactcagagtagacaacaggatgttagcagtggtgctgcttaatgaaaaaatgagttatctgtacttttcttaatagttattgttgtatctttttatggtaaacatacattgtttttgtaacaggagagaaaaagtagtgttctttccttgaaccaaaaaaaaagtaggccatttaaaaattaatgaataaggaaaatacacatgaaaacttctggaataagaacaaagctgtaatcaaagaaaattaatagccttaatttttttatatttgagattaaagggaaaataagagaactaaacatttgattctgtaagaaacctttaaaaagcagtacaagaaataacttcaaaaatactatattgagaaatgctttcaaacaactaagtatgaattatctgtttacaaaattccaaaccatgaaaatagtatttaaacctctatgttcatgttctaaagcccttataatcttgattatgagacttcaaaaaaatagcatacacattgaaaactatcaaccaatctcaggaatacagacgttcaaatcttataaaacatagcagatttagccaataagagaagaagttatcatgccaaattggatttatttcaggaaaacatatatgcctactataagagaatctatttacatccttcattgtaggtaaagatcagaaggaaaaaatatacaatactttttagttatgaaaaagtattgataaatgaaaagaatctgtccctaatttaggagtagaaacaaaacttttagcaatgtaagaatagatgatagtttataagcatgaaaaatattgtctatctcaaaacaagagccaactctgtgatcaatgttgaaatattgaaggtatcctcattaaaattagaaatataactagaatgactaccaaaactgctctttttaaatgctattttgcatattctagtcagtgaaagaagccaagtaaaagaaacaggaagtataagtattggggaaaaaagtcaaattattcatattaatagatgatattgtcaacttggtactaagtaaatcaacaatgacaactattataactaatgggaaaaattagtcccaaagctcattaagaaaagaaaaaacctagaaataattaaatattaattaaatgtaatttttctaaatgctaatttctcttttaacaacctattgaaaatcaaagctatcattttccacagaagttcaaaatgtgaaattactgtgaatttatttagcatgaaatttggtgatatacaagcctttactggaaaaataacagaatatttgcatccatggacagatataattttatatttcttggtgggaatattaatattttagacatataatttactacaaattaagctaaaatctgatagaaacacataaaatttaaattggggtggcaggaagacattggatgtgacaagaattactctaaagtttatctggcagcaatatagatgaggattaatagaaaatgttgaaaaccttaaatgaaaggtcatttgcccatgtagctattagagtgtttaataaaacttctactggctgggtgcggtgtctcacgcctgtaatcccagcactttgcgaggccgaggcgggtggatcacctgaggtcaggagttcgagaccagcctaaccaacatcgtgaaacccagcctctacttaaaaatacaaaaattagccgggcatgatggcaggcgcctgtaatcccagctactcgggaggctgcggcaggagaatcgcttgatccagggaggcagaggttgcagtgagctgagatttcgccactgcactccagcctgggcaacagagcaagactctgtataaaaaaaaaaaaaaaatctactaaaagtctatacaaacagattagtgaaacaaaagagaaaatcccaaaatatgctcaagtgtatataataaaaatggaatttcaaatcagtggatagagatggactatgaaagaaatggttttgataatcatgttaaaaggcaaaaccctgctttacacaatgcagtgaattaaatttcaccttgaacaaatattcaatcataattaagcttaagaagcccaaagaacaggaagaacgataggtgaatatttctacaatgaggcgatggtagagaactatgtagaaatgattttaaaaacccaaaatttaaaatggaaaacacatagataatttttaaaatctgtacattaaaaaccagtaaactgaaattgaatcttacaaatcaattcagaaaaataaatgcattgcctaattttaagcatacaggaagaaagtgttagacctggaggtcattattttaagtgaaatgaaccagacacagaaagtcaaatattgcatgttcacccataattgtgtgctaaaaaatgtgtacacatgtacacagagagtggaatgatagacaatggaaacttagtagggtgagggggttggagtggagtggataatgagaaattaatgtgtatgatatatttgggtgagggacgctctaaaagccctaacttgaccactacacaatctatgcatgtaacaaaattacacatgtaccccatatatttggacaaaaagaaaataaaacacatccaaaggtatatgaaaaaatgttcgatctcatttgtaaccaaataatgaaaataaaaataacttttccttgtatactttgtatgcttctgacagaagactgaatcaatttatttcatgagagcagtttgcaataccaatcaagagaaagcgtgcttacacttgactaagcaattgcatttccagggaaattatcgaagaaatgcttacatctatgtgcaaagactgagttgtacctatatttattgtttaattgttattacagtgaaaaatggaaacaacaccagtattcatcagtaggaggctactaaaaaatgatatatctctaaagaagggaaatttaaaataaaattttacaggtgattgcattgatattaaaggtaatccaaatacatacatgaaaaaataaagcagactgtaatacacagtatgtatacatataatgctgtattatgatcccgcttatatatgcatatatattaaaatataaatttttaacctctgggaaatgcattcctacctaattttaagtctctcattttttcttattggaattttaaaaagtgtacaatgcttattaatgaatataaatttgtttgaatcaatgttttcaatttttaatcaaattatctgtacatgattcaagtaatttttacttcataagttcttttatttaaatatgctgcattcctctctcatttctcactcctcagaggcagatatttgagtcattctctttttctaatgcgtgacaaatctgtaataacatgtttatatctctaattcttgattttctcattttttcatggtctacagtctctcttatgagagatgaaaaattatctcatttatatctaccccatgtatttgttctattaactaatttttcttttacatgaagaccttaaatgttaatttttttcttcaaaacagtgtcaaaagtatgtcttaacccttcacatgataaaatggggattttagtggtcctccatgtttcttcacttctcctactgaatttcttctcccaaattctgtaaagtctacttttaattttatgttgagttgcattccttctgtgttctctaactatgattaggtctcgtgttttgtcaaagatttattctaaaaattgaaaacatataaacagtatgtacactattattatagcaccataaatatatttcattgcagagtctattaccgtgttgggcttatatttcctttcctatgatttccatggcaatttacctctgctactttacagaaaatttcaagattcaagttaaaatggattctctttttttttctttttttgttttttgagacagagtctcactctgtcacccaggctggagtgcagtggtgccatctcggctcactgcagcctctgcctcctggattgaagcgattcttctgcctcagcctcccaactagctgggattataggcacacaccgccacacctggctaatttttgtatttttagtagagatggggtttcaccatgttggccaggctggtctcaaactcctgacctcaggtgatccacccgcctcggcctcccaaattgctgggattacaggcatgagccactgctccagccaaaatggattatcttttcttacactcagtaatctctcaaattcaaataacgacataggaaattcctaagtctattgagtctttatctaccaaatctccctctctttcactttctctgtctctcttatgtacacgtagacacgcacacactcccttctcaaaaggtaagagaataggatggtttgtaaaggggaaacgtctctggaaacacccacactttaataatgtcttaactaatcacattgcttgggtgtttttgttattttgtagtttgcggttttgtttgttttattttctgataacctgcagagtaggaaagaagagagtccagaaacttgttgtaaagctggacttcaagttggaagaaatattggaaggaccttttaaaaagagagttgtatgatatcgaagcagcctatttccctgaccccttcccgggactcgtgacagggttgcctcatttacctagaccagttttcaactccttatgggagggagcatgcaagtgaattccaggggtttggggtacgaatgatcctgtcacccaggtactgagtatagtacccaatagtcagtttttcaacccttatccccctccctccttccccttctagtaatccctagtgtctatcgttttcacctttatgtccatgagtacccaatatatagctcccacttacaagtgagaacatgtggtatttggcgttccgttgctgcatgaattcgcctaggataatggcctccatcacagctgcatctgtgttgctacgaaggacatgatttcattctgttttatggctgcatagtattccatggggtatatttagattttctttatccagtccaccaatgatgtgtatctaggttaattccatgtctttgctattgtgaatagtgctgtgatgaacacgtgaatgcatgtgtctttatgttaaaacaattttatttattttggatatatattcagtaatgggattgctggattgaatggtagttctgtcttaaattctttgggaaatctccaaactgccttccacagtggctgaactaatttacattcccaccaacagtgtataagcattcccttttctctgcggcttcaccagcatttgttgttttttgagtttttaataatggcctttctgactggtgtgcgatggtatctcattgtggttttgatttgcatttctctgacaattaatgttattcagcattttttcatatgcttgtaggctacttgtatgtcttcttttgagaggtgtctgttcatgccctttgcctgttttttgatggcgttgtattttgcttgttcagttttttaagttccttgtaaattctagatattgaacctttgtgtgatatgtagtttgtaatgattttctcccgttccgtaggttgtctgttactctgttgatagtttcttttgctgtgcagaagctttttagtttaattaggtctcgcttgtcaattttttggttttgctccaattgcttttgaggatttagtcataaatgctttcctaaccccaatgtccagaatgatgtttcttaggttttcttctacaattcttctagtttgaggtcttacatttaaatctttaatcatcttgggttaatttttatacatgtcgaaaattagggatccagtttcattcttccacatatggctagccagtccatttattgaacagggagtcctttcccattgcttatttttgtcaactttgttgaaaatcatatggctgcaggtgtgtggctttatttctgggttctctactttgttccattggtttatgtgtctgtttttgtgccagtaccatgctgtttttgtttttgtttttgctcttatttaaatgttataaaaattgcctatatttaagatgtataatgggatgttttgatgtgcatatacgcagtgaactgattactacagttaagctaattaacatatccatctcttcacatagttattttgtgtctgtggtaagaaaacttacaatttactctcagcaaatttcaagtatacaatacagtattactgactatagtccctatgctgtgcattagatctccagaacttattcattgtatgtaactgaaacgttataccatgctgattcggttgctgtagccttatagtatagtttgaagttgggtaatgtgctgcctctggctttgttctttttccttaggattacttttgggctcctttttggttctatatgaattttagtatagcttttttccagttctgtgaaaaatgatgttagtggtttgataggaataacatttaattcgtagattgctttgggtagtatggccattttaatgatattgattcttctaatccatgagtatggaaagtttttctatttgtttgtgtcatctgtgatttattttagtagtgttctgtaagtcttctcatagagatcattcacctcttttattttttatggctattataaatgggattgcatacttgatttggtgcttagcttgaaaattactggtatgtagaaatgttactgatttttgtatattgattttgtttcctgaaactttactgaagtcagtgctatttttagatggatatatgagaatatttaacttatatggagagtcatagaaattacacaatttgtatttcatacatcatccacacacatgctttctttacttaccagaatagtggaaatgctgcataaaatgaacttaatggtttttatttcctttcttcataaatgtacagtttatcaagaagatgccctttggcttactgacgtgtaaggagggactaaaaggaaaggaaaaagaataggtagctctaacttttcctttctgtctacatcatcattttttattgcaaggtggttggccaatataaggaaggaacaccactaagaaaagatattatgtggttttttggtcattagtgtttcttagaatgtcactcacttcttcctgcatatatatatctcaaatatatatatacacgtatatacacatatatatacatatatatctcaaatatatatacatatatatctcaaatatatatatatacacatatatatttagaagattatttggtgaatacactattagaacaaaaagaaagaagtattagcgaagtgacagggtatttcccaactcagatatatgatacctgctaatggactgttcgtgattataaatgtagtatatgctcattgtagacattatgaaaaacgtaaaatcccctataattagacctctatttgtgctaggcacatgatgacttttcttgctctgcaacaactattttttttctcttaaagtttataatgttgtcagtattgtcggatatcctcagggattccatcatcttttcttaattgtggttaattacttaaccaattattacaaattattttcctataatttattgctcttagtatcaaacaattaaacaccctaggaaatgtcttattacttgatctatgaactggtgagaatctatattctacataggggcttgttttctggttttaaatctaatacagtcgtttggcaaataaagacaaaaaataaatgttgtctacctacttttcaattatccaagtagtttaaaataaaaacatccttactgattttttaaactcttatataattgcctaattctacagtaactggggttggtagtaactaaaacctgttgtattcctagtgatgcccaatgagccttgggaaatgaataggtgggtatagtccagttgctagaaaatacttgcttgttactgacttatctgagaggaaataaacactttcatttatcagggacagagtataaagtgttcctcactgaagcatttctaaaagctctacagtcctttgaatactgataaggactctgaaatgcaagggaaaatatgcaagtaatctggactatcacaggttattttatgaactgctcatatttttactcctttgataagtattatttcccccaaccccaaacccgataaattcgataacccttttcatatataatattatcagcaaggcatcttagagtttcctttaaaaaatgtaaattaccaagagaaccagaatgattttggggctcataatggtagatcttaaagagagtggaaagatcagtagttttcgcattttgctacacattggtggagtgtttacaaacagtgatatctgcgttctatttccacagagtctgacttaagtggtctgtaatccgagcatctcagtttgaaaagtttcctagataattttaatgtgtatccaacgttgaaagccagagtaaaatgaaggaagttctggggcctcagataagcaacttcactacttttttcaggttctttgaataattgacatcatccccaaattcaaatcgttgatagtcatgatgagtacctgttttactccagaaatctatataatattggttacctcagtgcttgctcttaacttccataatcaaaggaggaagagagactcatcgtgttcagatacaggttgtgtaacgtgtgtctgtaaaatactaatgtgattgacttcatccatccattcacctatccatccatgcatccatccatgtatacctcgtgtacctccattcgtctactcatccaatgtctctgtctaggctccaggactgctgccttaaggttgtttaccaactcagtaggtagtatgttatcctcaggctttggaaacaggggggtttagttaaagagcaaaccaactcaacatactagattaacttgaaagggaaaagttatgcttagtgcataaattctttccctcttgtcctttcaaatccatttttcattctttaccactgtgctttgtgtcctggggactgccctttaggaatggcatcagagttcctttgccctacagtttccagttgagacaggctgcagcaggaggagtacagtggataagaaaagggtggagtatttattttcatgtggccccatgggatttccacaggttagctctgaacagctaacattagaccagagcttctgctggacagttctctcttgcatttctattgggtctggctctctagttcaggaaacgtccttcctcttaacccttgaggtctacagttaactctccgtcatcccttcttgaatttcctaacactgagcatatctctgttgataacccctttagcaaactggcctcacataccccgagattgagaaatcaatcctccagtttctaccgggactctgattgagttaatgtgggataatttgcttacactaccctcttataaagtgactatgtacattagcatattaactcctttgaggattttcatttacttttgttattaaagcattacacgttttttgataatgtgtaggagactcaatcatagccagaagtgtctcagacgcaagcacctgtaatgattcccttatatacagttttatcccaccagaaattgggactaggcacaagtgttctaggtaacatttcaggatcctactgtcataaagattattatggcacaaaaactatttggctagaagtatccccagactcctctgtgccacattatcttcctttatccagttatctgaggatgtgcttgcagtggcagactagcttttggggaaattttatttcaagaaaaaaagcagggaggaagaaaagggtaagaaatgaggaagggaagaggcccatgggctaggagtgggctgtcctgtttctgggaaactttgtgaaggtttcaggagtagtagtaactcatggtgaatgaaaatgagagggaattgttggcttttaaagtaataggatatgcccctttatgatgggattaagagatacaagtaagctgggcgcggtggctcacgcctgtaaatcccaacactttgggaggccgaggcaggcagatcacctgaggtcaggagttcgagaccagcctgaccaaagtggaaaaagcccatctctactaaaaatacaaaattagccaggcgtggtggtgcatgcctgtaaccccagctactccggagtctgaggcaggagaatctcttgaacccaggaggcggaggttgtggtgagctgagatggcgccattgcactccagcctgggcaacaagagcaaaactccgtctccagaaaaaaaaaaaagagatacaagtaaagttatgaaatcacctgtggtttctagacagttttttttgtgtgtgtgaaatattaagaacagaatacatgtgctaaaacattttaaaagcttaataaggtcttttaaatcttgcctcttccttttgctcgtctaatattacctcctatgtccacccccacggattatttacatttaatgctttctagtgaaatcattaaaatgagatttatggattattcataataggcaggatgaaaaaggaaggtgaggcgacagtgatccttccttagctgttaatggataaggagtttcacagcaagaggaaaaaggcataacattagtattaccggttgtctaagggggagagatagaattgtttttttttccttgcattttctgtactctactcttatttccaaatattctttaatgtttgtgtgactttgtgacttctatattcagcgcaaaaaggattaaagaattaatttaggaaatcaatttacactgagtgtctccagtgccagagagggagggaaggacattcgtagctacagtgttcataatagcaaataattgtattatggtcataccatggaatattatatagcagtataaataattaactatgatcacatgtaagaatatgagaaaatcataaaaacataatgtagaggtccacaaacattttcttaaagggccagatagtacatatttcaggcttctaggtcatattgcaaatacctaactatgttgttgtggcatcaaagcagccatagttattatatgagtgaataggtgtgagtgagtctaataaaacttcatttttaaaaactgtcagggaggccgggcgcggtggctcacgcctgtaatcccagcactttgggaggccgagatgggcggatcatgaggtcagcagatcgagaccatcctggctaacacggtgaaaccccgtctctactaaaaatacaagaaattagcggggcgtggtggcgggcgcctgtagtcccagctactcgggaggctgaggcaggagaatggcgtgaacccgggaggcggagcttgcagtgagccgagatcgcgccactgcgctccagcctggggaagtgcactcactccagagccggggagcccatgggcggtagtgtgctgacccttgtattagacaacactccagaaagctcaagcataggaacacctaatgaaaatattgttttggcatacatgcatgtgtgataaatcgaaaaaaccaacacaaaacaaatgagcaaacaaaagaaatcaaaggcaatgatatgacaatccccagattctggatggtagttaatcctgggtaaatggagggaggggtacaaaagagtgaagaactagtgtaggagcacataggttcaggtgtgagttgttgctaatatttcagttattgggatggacatatgtttgttttattattgagctttgtaatttacatatccattacatatattcttttatgcatcaaatatcacattacacaaagggaaatcataaaaattggggaaaaattggaggcaagcatagatcttggggcccagtgtagcatgcttttttctatttttaaatttaaaattgtttttagagatgcggtatttctctgtcacccaggcttgaacccctaggttcaagcaatcctcctgaatagctgggattacaggtgggtgccacttcacctggctaactaaaacaaaattcttttaaagatatggtctctctttgttgcccaggctgatctctaactcctggcctcaggtaaccctcccacctcagcctcccagggggattataggcacaagtcagtgtgcctcacttccttcaacattcttaaatacatcttggaagcacagtgtttattaccttgtttctaaaagagatgcatctattgtaatcatatttataatgttcttatatatggttttcattagttttactgaaactctcaacctattgttttttgatgatgactaccaatattcattgattcactgataatctttgtaatgtccttaactcttagggattagatgacattaaatctttatcaagaagtggattttgttacttaagtattttagtagcaacaaaattggtcacaacgacattccactgaagcagaatagtcagaaagcaatccaagccgcagaaataaattaggttgagcaagactacacctaatggcattgagataaagaccctactcctgactcactgccccgtgttctagtggtgtgcctgctctgcaattctccttaagttgatgtgcatctatctctttaggaccagggggtatttagtctgtaatggcttttccggcaacgtgtctcatttcagctgcttcagttgtcgagataacactctcgtcactgcctctctgatggtttcccattcaacagcagtcatttcatcttgggacacttttcctcacagtcaacagtttttcctttgtgtaattaagtctcatttttttctggatagatccatttgtgccagaactcttctgctgccttgaagcctgcaccattcagttatttttagtgttatctctttcctttcattagcacagagctaaattgtgcatattttgttctttcagctttatacagattaagatcttctagctccttagtcattcattttagctgttgcattgaatttcctacagttcatttaaatcacccagttcagtttaatatgcccagaataaataaagcatcattttttttcacatctaatcacctaccccgaccaatggcaagtgtaaggattataaacctttgtgactttgcctgtttactcccttagtaggtgagctctgagccaaaatataaattcattaaagtttttcttaatatctctagtctctacttctggctcccttccctcagggtattatcccctttacaaatatttttttgtgtctttaggtttccatttgttttttaaaaatacattcttatcaaaacgggaaaatattttcccatttctttcataaaccatgttttctcaatagttatctctaatcaaatacaagaaacagggaaataggtagtgccttacaaaggaattttagccatatacgtttggataaggtgaattttccatatcctggagatggttttgagtactcaggaggctacatctgaaaaaaaatatatagttattctctatctgggagtcaacttaattcttttgatggaaaaatagaggctgtgaatccccagctccagctggcagagatcactttgctcagaagttttgcacgtaaaaagaaacttcttttctgggatcactgatttatttcagctgtaccctgaaactggtagtcagatacaccctgtaaccagcagatctgatattctccagccttttcgggcttgtacatcaatcgtttaaactacactataatggggatcatttgccaaagctcattgccattctcttctagtcataccaatttataattacttttctctcaatatgtacccacgactctcctttcttcacccttatgatatttattcaaatattaaatgttgccctttttttctacctttattccaaatgccttagaggtctggcgtaaactatatggctataacctattgcatttttaccccatagatggaaaatgtattggtgaattgtttataaggttggaagttcccctgaaaataaaatccacccaccccactaggggagtacggaaactatatataatatgacacacatcgctattacttttattacatatgcttattatttattgttcaaattttcaaatatggtcctgcacacaggcaattttcacaaaagagcagtatcagtgttaatcagtttgaaacaggaaaggatttgtgaccccaccttacaaaatacaattccttatggttacaaaatctcattcaaatggattctattgtagccatatcaataaggaaactgatctatcagccaaaatcggaaatagccctgataaagtagactgagcttacattcatgcacagatgtttgctcattatttttacttgataaggacagatacgtttgtgtttagcataatgcgtgtgtgtatatttgaatagattttctagaccctcattttagttctagtaacaattgtctggttctgaatagggactttccactttacagaagcaggcaaaatttaatttgtcatagctaccactgaacccatttcctttatatactcaatctgctttgacacagtagatattggagtttcaaaccttaaaatgaaatacagctttatgatgaaatataagttgatatgaatactttcaatatacctatattctatgttacactcagttagctggcatttggtcttcactcatggacattttaaaaactcatacattctttagtgtttgataatgtgacaaatcaaccccctataaaattaactttaaatcaattgatacgttagcatgtgagtatatgtgtgtgactatgaatacatacttatataagcacacttatatgcttatacgtttgtttgaatctctcactgaccttagccataaaaacacttttattctgttgatttatacctcagcctacatgtgaacaaaagattcagcaaatcagaataacacagttactctattttctaatttatttgtaataaatatgcattacctgcataacgtttacatcaatatgggcatacattacttatgcaatgtaatgatctaaataacgcaactatcgacagtaaccacgcactctccccctagcaattacagaatacagtttctctgttgcacaacatgcctgactatcgtaaatttagggttatctccttattaggattccatttacactcttaatgaatcatatttattttatagcagcttattagtaaagttgactgccaagatataggcaatacatacaatttcctcaaaaactggggctttcactgttaatttaacaaacctatatgaatccatataatatatgaatcatatgaatatatataatatgtaataagataaaatgcataatttaacatatatgaaatatatatagtattaattgttaatatgtattaatatagtataaaataatatatataataaatgtataatatataatatatgaatcatataatagaaaaatatatgcatagacttgagttaggtgtaaagaatggaaaaattaaaaaatagtgcacttgatgagttcacaacctagtatagtgtgtcatagagaatgtagcattttgtgtatgcaatagtaaatatatataatgcaaaagaaatgaatggttttgcttagggtaggaggaatggggtaatatttgagataaatctcaaagcatgtaaagatttatcaaatgaagaattggggttatggaggagtaggggttgcattccaggagggagggaccaacatgtacaaaagcttaaaggaatgtaatttcatagtatctgggaaggacaatgggtagctatatgtttctgaaatcttgaatgcttgggtgaaataccaaaaatagggctagaaaagcaggttatgattagattgtgaaggcatttaaaagcgtcttgattagttgggaaataatttctacaacgttttagttgtataaataacaaaagcttcttttaatccagatacttagtggaagttcctctttctctaagtagaatactagacctaataataataataataataccgtatcatatatttttattacttttttggttttctgactactttcaagtacagagatggtccccgacatacagtagttcaacttaacaatttttcgactttaggatggtgcgaaagtgatactcatgctgtggaaaccatactttgaggacctatacaactattctggttttgactttcagtatagtatttaataaattacatgaaatattcaacattttattataaaataggctttgtgttttatgatttttttcccaactgtaggctaacgtaagtgttctaagcatgtttaagataggctaggctaacctatgatgtacagtctgttaggtgtatcaaatgcattttcaagtttcaaaatttccaaactatgatgggtatatcagcatgtaacttcattgtaagttgaaatgcccatcaaagatagactggataaagaaaatgtggcacatatacaccatggaatactgtgcagccataaaaaattatgagtttatgtcctttgcagggacatggatgaagctggaaaccatcattctcagcaaactaaaacaggaacagaaaaccaaataccacatgttctgtcttataagtgggagttgaacaacaagaacacatggacacagggaagggaacatcacacacctgggcctgtcagggggtggggggcaaagggagggatagcattaggagaaatacctaatgtagatgacgggttgatgggtgcagcagtccaccatagcacgtgcatacctatgtaacaaacctgcacgttctgcacatgtatcccagaacttaaaatataataataatataaaagaaaagtatctgtgcttgatgggttttgatatcctcagtaactatggccaattagttgaacatggcacagtattatccatttgcagtagaggaaacaaaggagaaaccagaggaacagtgagagagagagagagagagaaagctgctggtcatgtcctctttccagcatgtcaccctccatattcttcttcaaatcaaaaaacgtagaacggaagggagcttagtagcattcagctctgctacactgcacaccagctatacacacaggcaatcaatatggtttggacacagctgatataatttggtggagctctaattgaatttttccccttcttaatataattacacctacagaacgtctccaattaagtgtccccccatcagtctcaaaattaaatataccaaatggaactcattatctactcccacataaaccagctcttcatgactctttcccctttctattaagcaccactgcttccaggctcctatatctgaaatccctgaagtcgcttatttttgtattcctttctccatcccgaaatccattcagtcactgaatgctattgactaatgtttgaaattatatctatgcataccttcctttacgttatgggtaaatgtttttggaatgtgtttaaacagaacaaggaattggtgaacaaaagaataaagccatgcataaacaaatgtttattcaccgttttcattatatttgtttgtagtactgcaacctaaagtttgtaatgtctgagaatatctgattgtaagcaattaccccaaccccatgtaagttaacagtgttataactggtacgtctccttataggtgaatttgttcaaagttgcttaattatattttaaaaatctcttattttagaaagaactctcaattgctttactctgaataagataatactgtttagaagacaaatcattgcaagttttacatctgtaagtaggttacctgatgaaacggattgaaaaactgaaggcaaatattgaatgttagattattcccaggtatctgacttcatcttcttacttgctaggtgtcattgttaatgataatttaaaaaatcacacatacctacgtatccacatatacaaaacagtaagcagtcatgctattgaattcacaaatatacaccaaaagacaaggggaaaaatataaacaacagctttcttactagcaagcagagtgtggcgtgaggtcaaatttttatgacgaagagcatacatattcacaaagtaatttatctcaacttatgtagctggaaatggagttgatgggttctgaaaaaagcttctagatgacattaaaaaaaggggttcttatgacaaagaaaaaaattacctcaaagtagctttcaaagagatcgaataaagtcatttcatgaaatgcgagactaaaaaacatgccagcatttctaatatttctaatgttttatatgatataaatatgaaatataaaaatatttaatatttttatcatagaaaattaatggcatcaatttcttatcaaaatcatgcatacaattgattatatatatttgctaaagtcctaaaattttgtgtatacatgttggcctaaaatatttttgagggctcacaggcatattttcttttgggaaaatggaaactgcctaatacatgagatgatttatatacatgctgcattttacaagcggttagggaaacacatgtctattttttttctaaatcaaataatccgtgtgtgcaccatgctaccttgaatatcagattatcagatttaccatccctattagggatataaatgttccagaagaacataagagcaaatttttagaaagattaatacagaatctaaagattgaagggataagatgatttacattaaatctgtttccaggatatcctagttgggaaatcaacctaaatacccgaaaacttaaataatccaagacagtatgcatttgcttaacagactttttctccatcatttgtctgtgtttagtaagataaaagaaagacttgcggccgggcgtccgaggcagcgggtcacctgaggccgggagttcaagaccagcctgaccaacatggagaaacatcatctccactaaaaggcggaggttgtggtgagctgagatctggccatcatactccagcctgggcaacaagagtgaaattccatcaaaaaaaaaaaaaaaaaaaaaaaagaaagaaagaaggaaacttgctacccctcagtaaacaagttatatttccttcataactttcttcctataaggcaataaacaaatatttattaagaacctatcatgtgccaagtaaataagtactctgtcaaaacaagttagattcagagtgggctggaatgatttggacagaagggaatgtgagaaaggctagataagatggaaacttttctgccacaggcataccttcccagtagacgaagtagagatacaaataatgtagcgaagggtactatggaataaaaaagtcaataaatttatttatttagtgattacagctacgatttgctaagcaattaatatatgtcagacattaagccaagacctctgcagatgatgccatgtttagatcttataacaacctagtaaatgtgttaggatgatcaaatccattttattttatttaaattaaatagttaattttaatggatagaaaaaattgtttatctttatttcattcaacatgttgttttgaatatatatatatgaatggctcagtcaagctaattaacatatttattacctcacatgcttatttttttgtaggaagaacactttttttttttttttttggagatggagtcttgctccgtctcccaggcaggagtgcagtggcttgatctcggttcactgcaacttctgcctcacaggttcaagcgattctcctgcctcagcctcctgagtagctgggactacagcctcacgccgccacatcctgctaattttttgtgtgttttagtagagacggggtttcactatgttgcccaggctggtcaggaactcctgagctcaggcaatccgcccgcttccgcctcccaaagtactgggattacaggcgtgagccactgcacccagccaagtgaaaaacacttaaaatctactctcttagcaattttcaagagtataatacattgttatgaaccacctgtagaatcaacatgtacaatagatctctcgaacttatttctcctgtctaaatgaaattttgtattctttgatcaatatctctgcaagcctcacaccctcctcccagtctctggtaaccactattctactctctacttctatgagcccaactttttagataccacctataataagcgagatcatatgttatttggctttctgtgcctggcttattgcacttagcaaaacttcctccaggattatccatgttgtcacaaatggtagattttcttctttcatgtctgaattatattccattgtgtgtgtgtgtgaccacattttcattatccattcatttgttgatggacatttaggttgaatccataccttggctattgtgaacaatgctgcaatgaacacgggagtgcacatatcttttcaatataatgatttcatttctttgggatacatactcagtaatgggattgctggatccatactcaatttaaagatatagaaaacaagccataaatatttatgtcccccaatatccaaaagttaatcaatggccaaatcagcttaatttgtctgttttgtttttactatcaaacttaatacattcaccaatgctctttttcatagttgtagccttttcttgaagattataacgtttagtagtttagattgttatgtagacatgtggtgattaaagtaactcctgcaattaatttaactaattttagttatcatgtactacacttttacatactatttccctcaaaaatgttaaaaagcctttcttaaagcctttttagcagtgccttttatatttattcgtgttactgtttcatcaattgctttagtttggtgacagtttcatgtagttcatttactggattcaagttacagtccagttacttgaggggcccaaaagttaaggacttctgaaagtgcgtgaattgcttctactcactgatgcatcccaaacattcagatcttgttacctgaatcaggggttctattctttaaagttccttggaggatactatcagaatgaaaagactcaaaatagaagtcttccggaatacaatgttgtggttttaaacttaaaagtattgccagtacaacgttagtatctactgaggtggtcacactcattccagcaggtcacatactgagaactgcataggctttgtatggtaggccaaaataactttcagattgagtccatcaattatttttctaaaaaaaaaaaaaaaaaaaaaaaaaaaaacccagagtttttgaaaaacctacttagtcatttggaaaaatactatgacattgaaaatcatattcctggaatccctaaacattattaccaaaaccatcggccacagagctgtcttctactttttccccaaccccactaattccgagtgtatctgttcttaatattcaggttatacttaatattccatcttaatattttattttaaacacgttttatgctaaaaatttacacatatatttataatgttctttctttggggatatgaggattctactgctgacctactgctgaagtactaaaaaatagtacttcagtgtgtacagtaatagggttgagcaatttattcatgtcccagccaatttccaagtatccacacacatttcattggcaaagtattcatatccactcatcagagtttgtaatgtaaactgtttctaaagaatattttctcactctttcagaggagaaaatcagtgtattttaaaacataaagctaataaattccatcacacagaaattaacttcaatagggctgtggtttgaaatatgttgtaatccactgaaggaactcaggtaaaactagtaggttagctaatatttattttttatttttatctttaagggacaagatctctctctggcacccaggctgaagtgcagtggcatgatcatagctcactctaaccttgaattcctgggctcagatgattctcccacctgcacctcctgagtagctgggacaagtgcacaccacgccctgctaattttctttttatttttcgtggagacagggtcttgctatgtttcccaagctggtctagaactcctggcctcaagcaatcctcccgcctcagcctcccaaagtgctgggattacaagtgtgatccatcatgcctggtctagctaacatttttcttttttcttatttcataaaattgagactcactttgcatccatagacttatggaaacattttgaatccagatgccgtagccatttttttgtttgttttggtttgtttttcaatatcaatagaatcttttgtaagcaaaagaaagcaaggacttctttaataatttctgatttttatcgtggcatttcctcactctcctcatgccagcatagtccaaagttgctatttgctcaacattattcaggtacttaaatgtttaaacttgatagtttttaatgcatctataaatttaaacataattctggaaagcttcattttctataattaaaagtgataatctatcttattttaaatgtatttctgtcttgggtatcttttcctaattaaaatttaaactcttattttacaatgagacgttacctcatttatttttcattaaacaaataaaaccagacaatccctgaaaaacctatgaagaattatctttttaaaaatataacaaatccatgtgatgaaaactatctttttacatcaccactacacagaaagtttttcatttttttatgtaatcactattaataaaatcatccatgtaggacaataggcaattatcgttaacacctatagcaaagcatagataaagttgattttttgtttttgtttttgttttttttttaagatctcacttctgttgcccaggctggagtgaagtggtgcgatcttggctcactgcaacctctggctcccggggttaagcgattctcccacctcagcctaccgagtagctgggattacaggggtgtgccaccacacccatctaatttttgtatttttagtagagatggggtttcgctataatggccaggctggtctcgaactcctggcctcaagtgatccccctgccttggcctcccaaagtattgagattacaggtgtgagccactgcgccccaccctgacaaagatgattttactttatcttaacctcatcctcataatggggtttgataattacatttcatattttgatcacttaaaattatttttgttagtagcattagtattttgtacatgaggaaaaggtgctatgtaaccatcaaagtacagttctctttctaacggtaaaagtggttgtgcaaaatgtagcagttaatgtctataaataggagacatagaattctatgtttctctcaagaagaatttctgttaaaatataggaaaaatatatcaattcatatttggtatttatgtagattatgttatagtactcctattttacttttgtaatttaataagggaaaactttttaaaatattcattcagtgagtaactttattgagactctacaatacagtgtaagatttatataccaatactacaaccattttactgacagaaaaataaaaatctagaacagtttcagaaatgctgcctttttatgctgttctccccaaagcaggggtccccaaagcaggggtccccaaaccctgggccccagaccaatcggtccgtgacctgttagaaaccagggggaacagcaggaagtgagccccgggcaagcctgagctctgcctcctgtcagataagcagcagcattacattctcataggagcgagaaccctattgtgacctgcgcatgcgagggatctaggttgtgtgctccttatgagaatttaatgataaatgttgtaatgtgcttgaatcattcccaaaccatctccccagcccaagtctgtgaaaaaattgtcttccacgaaaccagtccctggtgctaaaaaggttggggaccacttccctaaagcttagggggtaggtctaaatattttctcaagactcctctaagtaaacacataaaagcataattttaatgaaagcacttgtatattactgcaaatgtgatacctgaacttttgtttgcttgctttcttgtttgttagcttttgagaatacaattgtttttattacttagagagtatacattgaaggaaattataagaattttcatacttgaaagggacaaaagaatatgcaataggaaacagtaaaaaaaaaaaaaaatcatgtcagggctttcaaacctatctgcagaattcctttcaagtttcagtcctttgggggagccttttagctctctgcaccctctccttctgcttatgtgtaagccttggtgatgcatttaccaaacccttcatatctgtaatcatgaggtagcttttctccttcattgtaaatttagggatagtagaaactgccttatttaacattgtatctcttatataaccttacatgtaccatacatacatagagtctatgggataaataaacgtttatacaaattaaacatgagatggatgaagagataaacggatggatggatgaatggatggatgggtgcatggataaataaataaatggttggatgaatatgcttataattatttctatgtaaaatatttttagtgttaatgacccccaaagtgctcttaaagctccaattacctagttaattgcacatagtacaaaattcatagaggtaaacaaaaaagaacgcataaagaaaattgtttctcctattatgttagctagcctcctagttatcctccttctctcttactgggggtgctggcattgcggttttctgtgtattctttcagatatctgctgtacatacatgcgcatagtcatacacatggccacgtatatcagttcaaatctgtcaggaaggtatgagaacatcaatttcctcataccataaaaaacgcagtatactaccaaacttttgatctttgccaatatgattggtgaaaaactatgaaactatgtcttttagtttgcacttatctactcaggaatgaggatgaacatattttcaaatatttaagagcaatttttgttactttttctctgaattctgttcgttttctttgcaagttataatattccttccaaaattgttttataaccagttgacagatgggaaccagtctctaggtggtatcagaaacagtgttatccagcatattcaaacctaccaacttattcgatttatcactatagctaattgtttgagtagttcatacatttatttacactatcaagaaaaacagtttcaacattcttgaccatatttaaaaatgccttttaggctacaaaggtagattgaagagagaagttccaaacagtaatgaaggcctctattccatcccagggaatttgcaaaggctctttcctggacaaacttgtgctattattttgcatgatggaataattttcatccttcaaatctgtttaattgcacatccaaaaaaacaccttctttgactatgaaatccagactagttctctctccttccctggactctctattttaggtactttctatctgaacatcttgtttatttcttcaataacacttattatattgggtgattatgttattttgtcatttatttgctattccctacaatagattggaagttccatgagagtagtttccttgcatgtcttgtttactgttttatcttcactgcttgatccatagtgtggcatgaagtaaacattcaacaaatatgtgcggaaggaataaatgaacatacacatctaatttctggtgtgtttatcaaaaattcaattgtatacttctggtagactgaatttaattcaattgagtttttcccatgtgtgataagaaggatagggaaagggacagatggaggatgagagggtaggagagaagaagagagaaagagatgggagggaggagaatgtagactctccaaggagcctaggctttttactgcatttatttattcacaatttactgcaaatgaatttcacagacacagaaactgcaagcttagacaccatcattgctctgagacaaatgcatccagagtgtatttgaagttcagatataattgatagataaatgtaaagctgggagaaatttattaaaaatgattggtaactcataactttcaaggaagtgaattgtttaaaaaatgtacataatacttgggttagatactgtgtttcttagttaaaatataataatatatgtatttcaatagatcatatatgccaggagacacctgggcgtattgactattacataatagtgattatctttatccatctagtgtttgattgaggacggaggttgatgtatcaaattaaattaattgagatctaagaatgacatcaataaacaaaatgttaagtttcaatcttcctttttgcatatgtactgctttaatctttcggctattgatcaccagttatgtttgcaaagatcacatttaggctttcctttacagagagatttaacttaccctttaaaccatgagtcagtgcttttagttttggggatttagtttccttaaagccctctgagggaaagaagggtatatatagttatatatctccagagaaattgaatatcaaagtctatataacatgtaatttatcaatgattattaactcctgcacttgcctgtgactgcctgtatttggtgatgaagaaaatatagaaaagtagatgattagaatagggaacctaggaaataggaattggaatgtagataatctacagaacaaatggtatcttcttttatttcaattgtcatttgaaaaactttctttgaagagtaaataaaatataacaaatcgggactgaattcagtagaatagactgaatactactaaaacataaaaaataaaagagctaaaaggtaactttaaggtgtagctttatgttcttacatttatggcatgagtgcaaggaaaggctcaacagttacatgcatccatttactttatagttgaatagtaaaaaataatgcagtgaaaagtaatacttcctagggatgttcttagacatgcaacctgatcaaaaaagtataaaacaggttggatagtatctctggaatctcccattaataccaacaatgccttttcatcaaccaacactatttgccatagtcttctcaattctatctggacttcctgattttgatcttttcaagccaatccttttacacactgctctcagacttagtcatctaaagggtctttgatgatctccattgtcttaagttagaagtcctaagcctggcctacaaggttctctattttttgtcattttcctattttgacttatttcctccactctttgactgtcctacttaaactttaaggcagtctccttagacctggaatgctgtttcccactttctcaacctaccaagcttttgaacgtcctttgggacccagacaaaatctgatctttgccgtgatacatttcattaattctctgaggtggaattagtctccctttcctttgattcttctgtagcacctgtaagaacctgtacaatagcaggtatcatattgcatggtaattattttccaaatgtccttctcctcattccaattatgtgtacttcaagggccaggacattgaatcattgtgtgtatcctatgctggaaatatattaagcttccatagagttctcatgtaaattattgtgaaacatttttaatgctatgaagaaagcattttaaatctgtttaagaatacatgttgaccgggtgcagtggctcatgcctgtaatgccagcactttgggaggccaaggcaggcagatcgcttgagcccaggagttcgagaccagcctggacaacatggtgaaacctcatctctgcaaaacccacaaaaattagctgtgtgtggtggtgggcacctgtaattccagctacttgggaggctgaggtgggaggtttcacttgaggcgggaggcagaggttgcagtgaactgagatcacaccactgcaccatctgggcgacagagtgcgaccttgtcacacacacgaaaaaataatacatgttgaaactttgggaaggttttgaagcaagttttgattaaataggacttagatttcaggagtcagttttatcttcaatgcactcaaatttttcagataataaaattatttaatatacagtcatactaataatatagacccttgcaatagataagttggtgtgtatgcgtatgtccaacagaggattcctacagtcacatatattttagccataaaataggaaatctaaataagcacctttgtcttagacttcagcacaataggtcgaaccttcatttgaatgtgactagggactgccaagtccctactgcctatctctaccaaaggctgatctggaagtgaacccttttctttctttttttttttttttctagcagatgaatgttattgagtttatctgtggtctagtgatgatacctgcagagcagcttcatttttcagagtcattcagaaagctatcataagcttcttccttcttgtcaggcagagcaaatcctggcatgacaggatgtactgggagtctccgatagtgggaactgacaaagatgtgccttcagcactcccacaaagccatattgtctttctggaaatgaggaggatttattcagcaaatctaagtgtaaactaggagacccatcagataaaatccatacaacaaagatcaccaaccattttttcttcttctgaatagagccagaagatgcaatttaccttcttctctttttttccccagaagtgacaatatagagttagagagaaattatagagcggagattttgaaattcagtttcctccccaactaccagttgaaaaagcatagccttaggaaatgttctcatttgatttcctatgttttataacatgttatgtttgtgaatttgtgtgtgatgtgtggtggtggtggttccaaaatatctaagatatatagtaaatgagcaaacaaaaatagtttgtagcttttgatatatcatagttgtacatattttcgtgttacatgttgtattagttcatttttacacagctataaagaactacctgagactgggtgatttataaagaaaagaggtttaattgactcaaagttccacatgactggggaggcctcaggacgctgacaatcttggcagaaggtgaaggggaggcaaggcacatcttacatggtggcaggagctgggggatgtgggggggggggaagtgccacacttttaaaccatcagatctcgtgagaactcactcactatcacaagaaaagtctgagggaaatctgctcccatgatccagtcatctcccaccaggtccctcccctgacacaaggagattactatttggcattagatttgggtggggacacagagccaaagtatatcacatgtaatattttaatcatgtatatactgtataaatgatcaaatcagagtaattgggatatccatcatctcaatccttcctttctttgtgatgggatcattataattattctcttctagctattttgaaatatacaatgaattattgtttattatactaccatatactagaaaaaatgctctttaaacctcatcagaacacttgctaaattgtctttctatatgcttatgacaacagtaaaaaacaaagatcacatgtccaatattactgggctgtgcttggaaaaaaatattttactcttttttaaactttagccaattatatcttcaatagatatcaacactaatatcacatctttaaaaagtttctatgggttttagtaaggtatataaaaccatcaaatatattatccagagagacaatatattgacatttaaaatatgttcttactcatttatggtatcacctactgtcagaggtaaagtaaatttaatgatgtctaaagggattacagttgcttaaattggctagagttttatatgatttatattttcattcttttctggacattggaatcaagtagtaaattttgaaattttatattatatttttacttatcctgtttacagtatcacacctgactcaatttagagtagaaaatatttctagttacccttcgtcagaatataaacatcttttcaaattcatttcagcattttaattgtgttaatagaaatagttcaaaaatatagcataaacctcagcatgttctattttggagagaaggaggacaatgattgttgactctgatggatagtttcccaatgtgaaaagagtaaatttttcttcataataatattttatttcatttcatatggtactctaaaataggcaaaatatacctttacctctcttctgaatactagaagtagaagtaaatgattttattattgacattattaattatactatatttatgttgatatgatgccttacagttcatcaatcattttcatatattttaattcatttggccctaatagctgtgaccacctcccagaatagcccagtcaaaagaggttgaaaagaaaaatcatacaaaatacccatgaagtttaagaatttatggcacttgaaatatttgcccttagacaatgttcttagtatttctgagcctcagtttttaatacatgaataagaatactttaagtattattcttccacataatgggaataagaatacttactccatgaaatgagaataagaagacttactttatgtagctactgagggagtcaagtgaggaacaattactaatgccatgacacagtgtagatgctcaatactcatcattcagtttccccttttgaacttaaggccagaaagaagtgacttcagtggtggtactaaggagagagggggtgatttagccttcgcttaacattcatcagacctcacaccaagccacaggaagcaaatatacaatctctgaaaatagggaaacctacattcaagacaaatcctgtgtgtacctcctccccttcctctcccagaaaagatggctatgtctgaatcacaaaatgtaagcggtcgcctaaaaattcagaaatcaggataaattatattttacctcattttaacaattaaaatcaatgcaaaataattcatatgagcaaaatattaaaattttaagagaatacaagatgtaatcttgcattcgtgccactcatgttctctggcctcatccttatctccacttaaccaccaactgaaggactagaaagttggcaatgacataaagcacagcttcctcatgccatcttcccatgtccccccaactttgggatagtaaacattgcctgaatttataatcctgtaatatttttaaatgttttatcagatacatatgtttcaacaatatttgttccagtttagtgtagcaggtaagactgtgggtttcagagcatttccacctggatttgaattctgtctacactaattactggatatctgaccttgggaatgttactgaagttctctgagcctcagttttctcatccaaaaaaaaaatggggacaataatagtaaatatgtcatagggctattgtgaacatatgtgagaacattaaaaatatttactgtatgacacaaaatgttttagtttgtttttatatttaaatgttattaaaaagatatttgggactcatattttcctcatgcatcatcccatccctagaatttatcttgattgttttgtgtagcagtcgtttctttgactactatgtaatcaggttaactgtccattttcctgccagagggcatttgggctgctcgaagatttttcgtttattgtgttattttgggcagtgctgctaggaacattctcctcatgtttccttttgcaaatgcctctctgtttttgatgttgcagatggattttaccttgccatggcatgaaatccaaaggctgtacccacagattccgatatttatctcttgcttgtccacacctagtaataaactttagccaaagcaaactgttgcttgttactatgagcctaaagtcgctgtgctggtccctcctgaatccttttctatgagtcgcttagtactcttgctctcaagctctggtctgtaccgagctgacagctttttttatttctaggactttattgctgttttaaagtctttccactctgaatctgtacctattcaccccagagttagttgcatttctctgtgtctctaacctgagggtcatgagtctgactttgctcagtgaaggcaaatattttcttcctctgcagtctgtgttcattttgataatgatgcttgatggggggactaagcatccccctgagaggaaagaatctcgtttggattgtaatttgtcacagtttgtcttagtttggatttctttaaaagctaagcctgaggcgaggactagagagcaactagctcatttggtagctgatcacagggagcacaagtgggaggcaggggaagtaaggaaaaacgggggaaaacaatagtgagtgtattattcagctggctactgcagtgggaaactgttgttcaatcctgtgaagacccctctgaggaatgctgtagaatgtactcataattgtccctctgaagaataagaggctggggaatatgtctctggttcctgtgcctcattaattatttctcagggacatcaggtcccctcctgtgtgttggatgagtgagtttctataactttggacaaagtcgtgaggctgaaacacagagaagcagtgggtgcttgacctggtgggctgttagcatgcccgagactctccattacagggctgatcaagccagaggtaaaccaacagagtgggcagtgtctgctacacagttccaactggatttcccaattacctagtgctatggtcttctttgacaacgtgtctcaagaaggtaacctgtagctctagcccactgctactgaatgtttcatacctggtatcatgtggattataactgtagtatttcatttttcaggtattgtagtatcgaaaagccctatagcctgttttccttagtataaattttgattaaattatgcaagtccactttaaattcacagtttgatgttatgtacttaggaggcactcaataaatagttcttaaagcaataatttttaaatgactttttgtattatgtagacacatattaactataatagagcccttcggcaggaaaactgtttcttcaaagttgcaaagtgactgacaacgatatatataactagaagcttcaagaaaaatgttaccaggggccacttttaaactagggggaaaatcgtttttcacaataagctatcccatctcctccctactgaagcctctgatctgctatgattattaaaccctcatcttttagtgcaagaaacccagcaagctgaaagggaaatgcttttcagatttaaaaaacaaaaacaaaaacaaaaataaacttaatttcttttaggttgatgttgttatactaacttgccaatcagttaaacatgtatctgtcttttaaaaatatcttattacataagaacaaaagattttaagacatacagtttcaatcataaccaaatgtgtttattacttcgaattttccacagtaacttgaagccatctatgtacccatctccaattccatcgcttccccactaccaccagagataacggtggtcgtgaaatttgctttgttttatagtcttgctacatatatatgtattactaaaagagaaatagtcttgctctgcatgcttttgaacttcgtatagttggaatcatattgcatttattcttctgtgactgtttctttcaatcagcattatgttgctaagattcatccatgtctgtgactgcagcattatgtcatattccgtcatagaaataacccacaatttatttatgcatactactgttgatggatactagggtcgtttccagttttaattcttttcctattacaaacaaggttccttgtatacatgtaggagtgggattgctgggtcacagggcccatgtatgtgccctctggtatactctttggctcctttacactgctctactgtgtaccactgggagactgacctttgtagactgtgtgtgccaggcttccatttccaggtgacttccagctctctttggctgatggtgaaggattggaaactcagggaagacacaagagtgcttctcttcctctctttgtgtttcaggcagtatctttggcaacagctgcatatgctttgatgtcccccctccaaccagataggcccactatagctgcagcttccaatgaatgatctcataacctcattcactgaattcatgcaccctgccttcttctttcctcctcctccccattccttctcctcttcctcctccccatcctcctccttctctctctctctctctctctctctctccccttctctcccactcttcttctctcctctcccttcctctccctgtactttaagggtaatagtggcttcctgtggttgctaaactctgagtcactttgtcctccacagcttgtcaactctgttcttctctcatttgtttcaattctataatttaagctttctgatttaaatatcaaatgactttttgtgtctgcttagattctgactgacatgatgtatttctaagtttccaagattatgccaaattatttttaaaattggttacaccaatttaaattctcacgaacttaaaaattctgcttgctcccaaattctaacacttgacaatgtcaaacttaacttttggctactctgttgagtataaaattgtttctagctgtggatttactttgaattgcattaatgaaaaatgagtttgggcattttttcatggttccattggcaagttttaaatgcagacaattgtttagaatacattatttttatttaataaaactcattattaaatgtatattcctttaaggctgtactttgatttagtgtaagtagtacacaatttacctcagttttccgttttatgtattcactcatttaatttagcagatatgaattaagttctacaatatactatacagagtttaatgtgaaagtaagaaatcagaacatgttatggctaggataacttgggagcacagccttttgaaactggtttagtgttaggatacacatttttgtgtttacctctctttcccaccgccagtttcaccatcattcataagatcaatgactgtggtacattacaaatataatgtgaaattgtttacaagatttagtattgttcaatcattttgcaggcactatcatggaccttcagtgtcaataaaggattcagaggttccagaaaattctaggctatatcatgccttgagaagtcctatctaataaatatatagaccacttttagagtgtaaaggaattcgtaaaatgtgtcagcttaaaatattgaaatagcgagggtgacttttcctttccaaactgttgatgaagactgcagacagggataaacattagctctgtgtggacaggatagtgtctgttgtctgagattctggtcatactggtttaatacccataattgaaagagctctaagacatggctttgtggagaaagaaagatactacttgagagaaagcaagttcatatttccttttactaataagtgttcagattcctaaaatactgtaacagtaaaaagatattttgaaactttctaagaaagtgtgttctagggcggggcgcggtggctcactcctgtaatcccagcactttggggggccgaggcaggcggatcacgaggtcaggatttcgagaccagcctggccaacatagtgaaaccccgtctctactaaaaatgcacacacagaaaaattagccaggcatggcggcgggcacctggaatcccagctactcaggaggctgaggcaggagaatcgcttggcaggagaattgggaggcggaggttgcagtgagcccagatcacaccattgcactccagcccgggtgacagtgtgagactctatctaaaaaaaataaaagaaaaagaaattgcattctaggggtgaacatccacatgtacctgggatcaatccttccacagtcatatcttcacatcataattctaaccctaaatcatcaagaaaatattatgttagacataccatacataagaagggaaagagagctgtcctacataatcattttcatgtaaacctttcatccagaagttgaggtgttctgtcatccaaaggagtagctctcagctgtctggaaaacctttttgttcagaaggacatttgttgtgctttggtttaccttgggttttattgtgccgcgtgtgtgtgtgtgcaattctcattctattaaattattgtgtgattttgatacatttatgtcagggattagaaattttagaaatagattatttctggttttctgatcaatgtgtcctgtctatgtattttgtctttgtgcaaaggaataagactaaaacacaagttatatgcctgagtctacaactgagtgttgtaaaccaaaattccaaatgaaagaaagatatggggtggatggcaggattagagaattgaaagagtgaagaacaaaaggcttgcagacatcagtaaaatatgctttcttagttaaaaatagtaagaatgttttggaatattttacattaatttcgtttcccactttttctttacttttgcacaattaatgatttagtttttgagtttcaaatatttggccaagcttatctactgattgaattcaatttcttactggatgtgtgtactgcttttttgttgcattcatggcataaattttgtggacgcatttctacaaaaaccgtggattcagcatgttgcagagtactatggcaagaaaactgagtaacagactaagctgagacttggtagaaaatatctgttctcctacaaggcttgactctctactgttacttcaagaaaatattatgttaactatatgtgttatacttaagaaggcagaaggatactcactcctctgacgtggcgagatactcctcattacccccacggaaatactatctagattgtgaactcatccatagaatgactacatatgattcattttgtgatttccctaatatgtattgagtttaaactacattgaattccctggagtttgactagaaggttgattatccagtagagtttcttgtaagaaattcttatagcagtgaactattctttatggcagataaatcctacctgtgtatactgattttctttcttagtaccatagttatactcaggttactttttttttttttttttttttttgctcatatagacaagactacataatcctttttagaaagggccaatatcctatttggaataaaaacaaaacagttagatggtaccagggtcaccttaaattaacttatcagactatcaaccaaatcgaaatatgatttcagatgtaattaacccatttgcctagtgagatgcaaaggtgtgaggatttcttgaacacatctttctcttatgtagcaaatatcaacctcctgataccttttgtagtcagttcacataccatgacaatacatcctaaattttcaggtgtgatctaaccagcataggttcacataattggcatgacacggaatttttaaaatatcaactacctcaggaactttattcatgtgaatctggaagatcctttttggtatttgagccctttcatagattcagatgtcaaagtatttttagaatgggtctgtaaggcatcattattttgtaattataatcttattgattgacagcaaatgctgtgttccatgaaaatgttgcattgaagtgatcccggttagtgctaaagacagactgcttagatctaaagtctcatgagaagaaagaaagaacttaaaatcattttaaattcaccaatatgacgatacaggatctctcataaaatgctgaaaggttgtttttgctgccagacttttagcacttccgttttacgttcaaatgttgtaaaggttgattactcataagttaaaatgtttggtgcaaaatgtactttaaaaatattttcagtgttttttggaaattgtagacatttgattttgaaaagtaggccagaaatttggaagactacaagccatatgatggctgatatttcccatggaaaatataatatgcagctgtgctctgctgcatggtagaacaggagattaaaatatgagaaattataataccgtttgatgatgatattaatgtcactgaatcaaataaagtatgtgatatatcataagttaatagaacaacacttaattattgattagagcctacatcacattttaaattatcggcatgtttggtcttgcaaagggtcaagggtgactcgtagcaacagaactattctcctttcaaaaagttagcagaaagttaatatcaaattctatgaggtagagagggatttgggctgaggtaggtcaggaggaacgtaaagagatgtgtcatgtgtagatttgtgagctgtgggcacctgattttgtgtttaacagtatttacgaccaagataagtgaatgaagagctatgttcttatgaaccttaagtttattttgctaaaataagtaagaaaattcaaattcaaattaagctatatagtcttgcaaatttcaggtctctgaggggtgtgcattaataagtattcaaaagtattttgtcatttaattactattatatgaatttttatgtaattgaattattcttgaatgttgagaaactgtctttactaggctaaaaattcccttagtgatctcgttacccaattcctttgtgttccactctcagtgtctgaattgtcaccaatatgtggagtccaaattatgaaatacaaagctttaccagaattctgatgattttgaaggaagaaaattacagcaaattttgatcaattctctcctattagtgattaattcaatgaaccgcttgaatttcttatttcctcgtagaactgtatgtacatgaaggatagatacaatatttagtacaatctatagtgagatatgaagggaaggagattatgagaaaagaataaaactttattataaaaatgcttgttcataaagatttgacacaaaatcaatatgataagttttcagaaaatcaaacaatgaatttcgtatgaaacctcacattggcaaagcagttatgtgaataccaatattttttaaatctaaaacaaagcattttgaagtagtttcatgaataatgtactgaacctgtttcacgcaatgaaatgaacatcacagtgagaaaattattccacaattgtaaagttaagtgaagcttgcattataaggccaataatactcaatagggtattttctcatgaatttacactatagaatgtttttattctggaatttggatgatatcatagtcattcaacaaatacagagactaagtgatttttaaaatctttcaggaaattagttctttaatttcatctacatgtatgtaaaataaccaaacctatgtcttatgcatataatgtcattctaatatattgttcatgatcataatatttatatagaatccattttgcttggccgattgatttggcttggcctacaaattagtacagtccctctcaactttgacacttctgtgtaccatcagctccttcctggagtactgaaatagcatcctaactgctctctctcatgtagtcttgaccccatctataaatcctaatttcagcatttggagcaaccttttagaaagatcaattaaatcatctcacctcttcattaaaacgcctctcattctaccaagagtaaattccaaaccttttaaccttgacctacataactggaccatgcctccctcgcccatttcaattcagctttgctcttgtagctccaggcaagctagctctgtcttagttcttgcatgtaataagctttcaagtccctcggtgtctacttatttactgttccctctgtattagtccattctggcattgctgtaaagaaatacctgacactggataatttataaagaaaagacgtttagttggttcacggttctgcaggctgttcaggaagcatagcagcttctgcttctggggcggcctcaggaagcttctaatcatggcagaaggcagacggggagcgaggtgactcagacggtgggagcaagggcaagagagacagcaagtggggaggtgctgcacacttttaaacaaccagatctcgtgagagcccactatcgcgagaacagcatcaaggggatggtgctacaccattaatgagaaacaccgtgatccaatcacctgccaccaggccccacctctaacattagggattacaattcaacatgagatttcgtggggacatgaatttaaaccatatcactatctgactggaatgtgctttgctcctgcttctacttccgttttctgagcaatcagacagttattcattaactcattcattcattcactcactcatttgttcatttatgtattaaattattcagtgattctcaactctgggtggttttgccgtccaggggttatttcaccatgtccggagagattcctagtggcataactaaaagaagagatgtttgctactggtgtctagtgggtagagaccagggatgttgctaaacatgtaataatgttcaggtcaacccaccataataaagaatcatcttgtgcaaaatctcagtagcaccaagattgagaatctctgcaatacgtcaacaacccttctaggtgccaggaatatgacagtgaaccaaatgaatatggtctaaactttcacaaactaatccattaaggagaagatagtcaataagctggctaacaaacaattaaatgtatactttcaaattatgttgggtgctctcatggacaaggggacaagagagtggccagtgaaacctaatttagagcaggtggtgttgggggaggtggtgtttatgctaagacccaaagaatgaaagaaagactcagccccaacttatatatatagtaaacatttattgaatatcaatagcaaaaagttgcatttttctcaaccatgtctttttatggtaactggaaattgttcaaattattttttagaatcttttaatcatagattctttgctaaggggattagtctagcatttttctcttgtgagcaattaagttctcaccaagttagtgaatcctatgtcttatgtacttcctacttattactatgaaattatctaaaaaatgctcatagggttcctaatgtagttgaaaagcaaactgttgctgcatctctaatcagtaacaaaacttgtatttctgtcgcaaaataatgtaaaattttatagtactttttacatatttatttaaaacaattttaagtaagattgtttctttgtggaaggtcatatggtcccaatatagggatgtgtacagaaatacatatatacatacaacaacacaatgttaaacctagcaaaagagtggagtctctttcttttatttttcttactttttgagcaacgagacaagcaacatattatgcctagtcacttgaatcatacaccattaaaacattatgggctgagtgcagtggctcatgcctgtaatcccagcactttggaaggccaaggcaggtggattacctgaggtcaggagttcaagaccagcctggccaacatggtgaaaccctgtctctaccaaaaatacaaaaattagccgggcgtgtggtggtggatgcctgtaatcccagctacttgggaggctgaggcaggagaattgcttgagcccgggaggcggaggttgcagtgagcagagatccgccattgcactccagcctgggtgacagagcgagactccatctccaaaaaaagaaaagaaaatatgaaaagaaccatttttaatgtcaactactgctttgatgctaatgtctgtcagttcagtgtctatgacttaccctttattctgctcaaaaccttcttgaattttccatttgaatatcccacaggctcttgaccccacttatccaaaattaaacctatcttcctctctactacacctcttcttataatctttctcttgctatttctaaacatttagtgggccaaataaataccctaggagacatgacttgaaaggggtatgaagtttagataatgttcggcttcttgatctgatactggttaaatgggtgcattacatttgtgaaaacttattgagtcacttatgacttacagattttctctatatattttatattttaagaaaaaagattacatataaattctagaagccaagctacacctttccctcttattcatccagcacatttactgagacagctagattttcataatgactgtccattgttgaatatttgctatatctttgatattgttatccattattaacttccttacctggtttgacagttgaaaatttctgtggtgcagctattattatttccatttcacatatgagcaaaaagagacttagagtggttaagtaacttgtctaagttcacacaacaacaaagtggcaggagtagagtttgaattcgagtcaatatttataatcactatgatatcttgcttctcgtgttccagtcgcattaaaactatgaatgccactcccactccttatccatccttactacctggcttcactttagatcttcaggtcttctttcctatattataatgataatatcataagaaatccagtgcagtttagtctattccaaaatcagtctaaatactgccaggattagtgttcattccacaatataaatctgattgtgtagtttacttaaaatccattaacacagccgttagcaaccttagctacatgtgaaaatcaccaggctccacccaagataaattaaatcagaatctctgggtatgagggactgggagtgagcattttaagaaagctccctgggtaactgtaatgctcagctaggcttggaaaccaatgctttaacgtttccctacagcttttattataaaaataaacccctcagcattgcacaaaatgccctttgtaatttggtttttgccttcctctacctcgcctcctctgctgtaattcccttcttctcccactttttccccaccctacctacatacatttcattgcaattattcaaaagtctttgtttcttctgaagagttatgatttttataccatacccttacacataccagtcttcccctctaaatgcttagttacattatctttgtacttaatccttttagttgctgataataaatgaaaatttctttttagtttctttttttttttttttttttttgagactgagtctcactctgtcgcccaggctgggctgcaacctgggctgcaacctccgcctcccgggttcaagggattctcttgcctcagcctcctgagtagctgggactacaggcatgagccaccaagcccagctaatttttgtatttttagtagagatggggtttcatcatgttggccaggctggtctcaaactcctgacctcgggtgatccacccgccttggcctcccaaagtgctgggattacaggtgtgaaccaccgcacctggccaaatttctttatagtttcttgacttgtttttaatttagaaaatttcccacgtatatagacaccatacaatttataatgtaaagctgttttcctatatcaatcatgttttaccttttttctctttctcctatatatgctgcttcctggaagatctaggagctgacaagtgtctttttatcttgctttgcaaatctaatcttttgccatttctttttatagaaatgaaagcttgtatcatgcatactaaagatggcttcttctttgggctgtagggccatttaatgagttatattgaactgaatgctttataagagttcaaattagtacattgggatactcctatgccagggatggattaatatatctgtccacatatatacacaaaaatgtgtgttgctaatttccaaattagagaatacttattttgaattatcagtatctatgacatattttgcatgtggtatatatttggttaattaaactgagttaccacttgttttatcaaaatttggtgtctttctaaatatatcatgaatatttttcttctaatgcacctcgctttctgctggaactatagaaacactttgtaaatttttacttgtgaccactcgaacatttacaggacattttacctgaaaattttttctgagtcagtgaagaaaatgtccatgtttctgcgtgtgtgtgtgtgtgtgtgtgtgtgtgtgtgtgtgtgtttgtgtgtgtgtgatgcttgcttatgaggaatttattttggctatggttctttattttgctattgcactcttaacattcgtatgatatgtattattaccctataaatacttacacaatatattcttacaaaaattaatacaaagattggccaaaatgtaatagcatatgtttttgtaaatagaatatccatatacagtcataataaaactgaagagcgattttatacttttccataaagccaaagattaagggtgtaatcactgcttataatttactaggaaactataaaacagataaaagtagatgaaaggatattacaaatatctcaataagtcgtcctccgcaactgaccccttgctttacacatgttcagacactctatactaaactctgtttatttttctattttataattttctatatgatcgtaattcagcgttttcctataatattattagtagtgctaccaacagatattacattttatgaaaaattttaaaaagggcacatgttgcataaaactaggttttgaaacagctgcttataatgctgatatttagcacatgactaggtggaatatggactttttaatgaatattttttcaaagttaggtaatttctcatcagtcagtttcaaaagcaaagttaaaatttgtgtttcaaaaaactgggtatgtttgaaaattgtatttaataatggattttgagagttctcaatagcaaattgcttggctgactgtagtttaagaagtaataattttgaagagaagttgaatgcaggtactttcaaagtgttgaaatttttaaagaagaaaattaaccttttcagactgtacacttgttcatcttttatattcttttccctttaaaaaagaattgtagtaagaagggagattaccttctgtcattgatacaaattttccacagtataaatgctgtttatcacatttgtataatatacacttcctatcaattttaaaaattacatgttactactatttaactctgacttaattattttaaatataaaataattcattcttttataaataatcaaaactatagttttacttttctttcaaaatataccactgactacattacagattagattttttttagtataccaaacatattttcatcttttggagttattggaagagtagctgcttactgccttacattttagatttctctatataacaagcattttcatcattttggcttattcgagtaattcttaataaataataatacaatatttacaaatgagatgtcatttgcaattttaacacttcataattttaacaaaatatctttactttgagttttttactttccttttggtgtgacattttgacctccaatgtgatcttcatttaaaggaaatatcaacgaaaattccttttttttcatttgctatagatgtacatataagatttacatgtgtaaggaatatagagcaataatgaattgagctattcctcataatcacttcacttaagaaatagggggctgggtgtggtggcttgtgcttgtaatcccagagttttgggaggctgaggtggtaggattgcttgtgtccaggagtttgagtccagcctaaccaacatatcaagacattaagtctatgaaaaaattaaaaaattatctgggcatagtggcatgcacctatagtcctagctactcaggaggctgaggcagttgaatggcttgagcccagaaattcaaggttagactgagagctatgatagtgccactaaacttcagcctgggaaacagagtgagggcccttctcttaaagaaaaattgactagaatatgactaatactctagaagccctcctccacatgccacccttcccaaatgcaccactattctctcttcccaattttcatttttgtatttattattcctattcataccaacacaattttaccagatgtgtatgtattttcagcaaatatttttagtttattatgcacttaattgacactatggaagaacagcttttaagatattattccaacttagggaattttaaggaaataagacctttgtatataaaaagttaaataggaataccgatttgcttttgattagtgttaaatcacataagtttaaatttgtaggagatcatagagatcagaaagcccagtggttcacaaactttcttttttttatcaacaaaacctcttttaaaaatatatagcataaggaagacggaaccataaaactgaaattacagcagctcaactgaattgtgagtttcaactgaactcaatttcaaacccacaaataagtcaaactcttactttactgagaatatatttggaccacacagagtttaaaaaacatgtttaaatttatttagcttatttataccagaaccaatataagaatccataacattctgcattagaattaagtacaaacactttttctttctttctttttctttttctttcttttttttttttttttgagacggagtcttgctctgttgtccaggctggagtgcagtgacgcgatctcggctcactgcaacctctgcctcccaggttcaagtgattcttctgcctcagcctcctgagtagctgggactacaggcacgtgccaccacgaccagctaatttttgtatttttagtagcgacggggtttcaccatgttggtcaggatggtctcgatctcttgatctcgtgatccgcccgcctcagcctcccaaagtgctgtgattgcaggcgtgagccaccgcacccggccgtagaattaagtacaaacactttctatgatattatactaaattaaaaacaggaactcaaaatgatacaaactgaactgaaataaaataaaataatacagtgaatggagtccacaattaaaatacctgcaaggacctgaaagggaatggaaataggtgaagcaaagatctaaatgcatacggacattgtgtaaattggaaagaatactggcaaatggcacgcctgtgcccagtctaaaatgggcaactgctaatcaattcagtctagcagtgtccatgtcagaatgtagagctatttttggccatatattttatttttcaagaggaacttaagaatctggagttgtatgtaaaacatcccagtgcactatatatttgcctcataagttgagcacttttttttatgtgtgcatgttgtctactggtgaatcccaagcacttggaacagtgcctgatatatagtaggcagtgatgtatatttggtgggtaactggaaaaaggttttccaattaaaaattctgtgcaagcctgaggtaggagttgggcaggacttatttcccattcccagaggataaagtgaagaaactggcaggtaccagcaggcagcgaccaacggaagtgagaaaaacagcagaaaccagcagatggcaacaaaagtgatccccagcagccctcattgcatattagcagaagccactcccaccagcaccatgacagtttacaaaggacatggcaataacccagaagttaccacccctttcctagaaagttctaaataacctgtctctcaatttgcattaatctgccacttaatttacatgtaattgaaagtgggtataaatggatataaatacagtagccagcagcccataccctgccaactttggaggcactgcctatgagttgtccctatttcacaaagcgcagtaatgttcactaaaacatagctgtttaacgccactggctcgcccttgaattctttcctaggcaaagccaagaatcctcccaggccaagccctgattttggggcttaacctgtcctgtatcaaactagccaaatgtatctcaggcctgaattagatcaatggctaccagttcaaatcttttgttttagatattagagaggcaggaagtgactctctactgtgtagcatgatactcagagcccaggaacttcttcagaatcccagtttgacttccaaaacgccagtgtcttgcttttatttactcttgtgggtggcagtaagggaagggagcatatctccttagcaaaacatctcatcagaacacggtccatagcacaaattattaattaaagacttacgtggaggctcaaatatagagccaaagcataaccatttaacaattatccttcaaagcaattttattcttggcttttggtggaaaaaactcttaaaaataaaatgataattctacatatgggatttgtgatgctatttagcaaggatatgctttattgcctgacatcccctttattttggcagaatactatgagattctcattacgtttccatttgctgcggaaagtggagaaaagttcagagggggaagactaattaaaaaaatggttgtctactaatccattgaactaaggcttcttaacagtcatgctcttcttaatagtatgaacacacattttgtattgattgcagagaataaagaaaaagaaatgacttgttttgaacttcaaaatggaaaaaatgaatacaaaatccagataagcctttgggcataccaactttttcgacttgtattatataacaacagttggcaaatgatttcaagttgctaaagcatagaaaatgatatttatttgatgaaagctaataaatcagacagaacaattaatggataatttggattgaacaagtatgaaagattccaccaataagaaccctcctacctaaaactatgaggtttttaaatgaaagactctcctaatgtcatagattttctctacctgtgctttatctgaaaataaaaatcacagcttttcccttcacctcttcattctctactcctccttatatttcccctttccttcttccttccttctccttcctttactctttgttctttttattcctgtttgttctgattacctgtgatgttttctaaaaacattaaaattttggtcaccattaatattttttacaatgaattaagaaatttatctcagaaactggatttgaaccaaagccttgttttgaacttctaataagtagactgaggaacaagcacgattttaagggcatatttaataggcaaaataaaaaaaacgcataaaatgcccagtcgttgatgaaaaaaatatatttttgtaattgctgttattcaggtgcttgaaggcccatgttaaagtatcactggagaagataaaaagcatacttcctcaatgtgaaaaccctcaaaagaaagggctataaacactttgtcctgaatatttgttgtttcaattgctgacgtttaacttttcatctgacagcaattcaagttctgcgtaccacagtgttgttgaatctttgaatctgaaaaatattttccttgcagctgtgataataatgtatctcctgataatgcatttaatgtggcaaagacacttttcttaaacacagtgaaaactaagtgttcattttgtcattgtaaaatgagacatgtttagttgctccaaattttaacttgggtaaccttgagacatagttgcacatttaacatcctatattttgcttgtcttgcagtcaagtgaattatcttagttactggagtgttacgtgacaccaattgttttgttaccactgctttaaaaatagctctatccctagaccccatcagtagtgtgtcttttagggccccgatttttttctaatctataggttagccctcaaggcaacgtggcctctttctgtttacttctcattattcctgtaattccaattctacatgtgactctttgctttattttaaaacagttgtgcattgctgatgagccttgaagtcaccaggggtggctggtgtcaatagtgagtctgtacatggctatttttatccataaagcagtttactttctgtatgatgaaaggcgttaaagtaaaacctgcctcctattataccctaggggtgtaatcaagagggatttgatcatagcataccaattaagcaggctacagcagactgctctgggttgtactaaggagtagggtgttctccacagatttttgaaccctttattgcaaaagcatcagggcacagcacatctaattcttttcatcgcacagctgtgtacataaacctctgtatacagtttctgctcagaggctgtgctcttagatttaatttttcttataagtcattacagccgtgatcattcatttaaacctcggcaagataagcattactagttcccagtaaactagatgatctcttcctctagactgtattttctcttatgaacaattataagattacaagactagcaatgttgcttatttacactacactacacacacacacacacacacacacacacacacgttcattccaagccagcagccagctcagcatccttgaaagctctcaacctcagccgaatatataaatatcagaattctctctaccaccctcaattagaaaatgttccagttctgcttttaaacttccactccaattcttcttgctaaggcctggaagcctcaaggtttcttgtattgccttatatacacctggattattcctctctgttgaaaactatgtcccattggaatgggagtgtctgaccagctggtgcccaagaatgctctcagaaaacgatcttccacaagccagagccaaaacccaaacccttgacccttatcaaccttgacgcccaaaactccaggtgtggattagcacagtaacccgcaaacccactcctacacgaaggaagatttttctagaacaactacagctctccttttatatttttgggtaattcagttatgatgaactgaaccagaagtataaagtatttgctcagttcagttcttaatctttgtcatggtattacaatactaaaccacttgctttgtcactttcatatagctcataaaagaaaatattactgtataaaatagattctgtagtccttcacttgttgttatggactgactattcgtgtttgccccaaattcatatgctgaagccctaacccccaatgggacgatatttggagatggaacctttgggaattaattagggtaagataagcacatgcaggtggggctctgatccggtggcccgtgtaaagaaaacaccagagagcttgctcttgctttgccatgtgaggacacaggagaaggttgttgtttacatatcaggaggagagccctctccagaacttgaacacgctggaacactgacctcggacttaaagcctccagaactgtgagaaaataaatttctgttgtttaagctgcccagtctatggtatcttgttacagcaggctgaaatgagtaagacacttgtattgtccctgcggttgacatctgactctgtaaaaacacccatgcatacacacacgtacacacaaaacaacaacataaccagtaagataggtaatcaagtatatggtaaatgcacctgattgcaataatgtgcgcatacccttagaatgaccctgtactgcagacacacctgaatgtgttttccgagctacggaatctgggagtagcccagcaagagagcccttccttgtctatgaggaacatctgagccccaagtgcatcccgtggaacacgggccatacatacagcggattgaggccccgagttttgggttggatgaaggttgccaggtgaacgtcattaagggcagagggttaagtaaaaatgctatataaactgcatgctgcccgcaagcagcgttggtttgcccgctcatcccaccgccgccatcactaccactgtgctgcgaggctatcttgtccagtctgccaccactggatcgtttctacaggtaaggcacttctcctgtccagcccaccactactgaattccctcccctgtatgtaaacctctaataaaacccaatgcctcgtttgctggctatgggtttcttcctcagtctcttgaacctgatgccttcgctattgagggttataggggttcagtacaacatcatgatgtgaacaaacgcgtttatttgggcagatgtattggtcagctctcaaaacaataatatcaagtaataatcattacctccaacttaatggttttaaatagcattaattctcatggtcatgcggggtttggctgacctaagttgatctagatttggttctgcatcaggctggtagttgctaggcttggctttcagcggcaggtttggtttggatttctttgatgtgtcacgtccagaggcacacactggaatggcaccggccacccagtgcatgttttcataggttgtcactagatagcaagcccaaacatgccagcccatctcaaggctctgctcctgtcatgttttcttaacaccccgttgaccaaaggctatcacatttcccaccataggctagatatgccatcctattaagtaggaatgagaaagtggggaccaataaatcaacctacagtaggaaaagtaggggattatttagtagcacaaacagatgagtttcagtgggcttgctgcttttttgtggatatggaagaaatacctaaaaaaaaaaatttccagctccactacaatatttaagaaaaaacttaggtgtgttcatagtttactactttgcttaataaccccactgtttatcacagcaaatttaatcacctctgaggggttttaatggctttgataagacaaagagtaaattactgaggaggaagacggtcactttcacatcctgagagatgctaactgtgcaaggtaattcacatatatcttgtaaacatgtttgcaaacatatataggagataggtggtattctcattttttaaggaaagaaatggaagacatgagagaatgagtaatatgtttaagaggacacagctggaaactggtataatctggctctaaatacgggcttttgtgttacattgaacagagataaattcagcttatgttaaggaagcatggggtaaaaaggtcaagaaactgaacaactgaataaccaaataagtaggcgaaaccatttggttactcagttgtctgaccaaccgaataatcaaaacaaaaatgtcacattagaaaactacgatcagtgtaattttatgaataattgaactattgagaccatagtgtagcagctgatctatcacgtcatgggattccatcattcattctcatgaattaactactctcagtccttgcttttagcattacctctactccctaatgatacatgatttttactctaacataaacttcccaggagaaaatgtctgataaatatcataaaatcatgaaaatatctgataaagtcatcatcctgcatcatgtgtgggagacttaagtttgtaactcttcccattcctttaagttggttttcagccttgcttacacgatcattgtggccagagagacagaatgtgccaagcgtgtaggcctgagctgggaaacaatgtcaataagtaatacagtataggggatgagaagtttgccaaataatacttggtgtgtaatgttatgaaagaaagggggcattagaggccgggtggctcacgcctgtaatcccagcacttcgggaggctgaggcgggtggatcacgaggtctaagagatcaagaccatcctggccaacatggtgaaaccccgtctctactacaaatacaaaaaaaaattagccgggtgtggtggcaggtgcctgtaatcccagctatttgggaggccgaggcatgacaatcgcttgaacccaggaggcagaggttgcagtgagccgagatcgcaccgttgcgctccagcctgggcaaaaagagtagaactctgtctcaaagaaacaaaaaacaaaaaacgaaaacaaacaaaacaacatggcgtggggggcatcagaaacacacaatggtacagatttaaaagctcctcgggtgatgctaatgtgtagccagggctgaaaacctaaaagaagaatgtgcagtaatgttgccagtactggaaggaagtgtctgagttttgtctagtgactgacagaaggctatgaaactgtaacagttgtaaggggttgagggaaagccgaggccagatcatgtggatcatgtgcaaattgtaggtaaaatgtaaagctgtgagttctgtggcctcactgaggaagcatttctctgcttttcaggaagtaacttggagttgagtgctctatgatttccaagttgtcagctaacacattgaataactgatgaattatggttctgtggccttcatttctgtgtcacgtggctatactgttcattggcatatgcaggcagtaacccccaaactatgacgcgagaggatggcaggattccaggtctgaagagaaaaaatgattaggctggggaagaatgatttgaggaacctcaaatcagactatggcagcaactactaggtgtagggcttcatgccatccagccttggagttgtcagttttctattaatctttgctaacaataaaatactaatgggtacataatgtagtgatttacagatgatagactctccttatgttttcattttgtctcaacagagtccagcatatttcatccaaattttactgatcagagaattgaggtacagacagaccatgaaggtcatgacagttggaaagtgttggagtagaataaggaagcctgatttttctcatttgtcctacatcgctttattagattgtcttctccagccttacctccccgccttataattcttgattttcatgaaacctattaaagggaaagaaaaggaaaactagaaaatttaatttagatcacttttaaaaatcactttgcatcttggactgttgtcataagttataggattaaatcctaatgattctaatgttgttaggccatcttaatttatatgatccacttacctctcagtcttctctcactggctcactcacctgccctctgtatatgaggggattgagaaaagtctgtttttcattatgtgtagatacacagactggtgtgtatgtagcaggaataaatgttcgcaaaactcagatgtggaagaagtaactctgaatttttgccctatttttgaactgtactccaggccagtgctgtccaaaagaaatataagctatatatgtaatttaaactttttgagtagccactttaaaaagtgaaaataaacaggtgacattaatgttttatttagctaaaatatttcaacatgtaatcaaaaaagacttaatgagacattttacgttagtgaaaagaatgtactaaatcattaaggttggaggatattttacatttacagcacatctgaattcagttgccatattttcatgggttaaagtaaacttgttctcccaaaccaatgaagttatggttaatggaagaatattaaaaactgtttgttttcaatataaataaaattgaagcaaaaataaagcaaaatgaaaatttggcttcctcagttatgctagtcccatttcaaatgttcagtagccacatataactagtggctatcttactggacaacataaccccagatcatgataaaacgttctgatttcccgaatttcttttttttagacaatctgggatgtttcgccttcttaccaaagaaacaaaaaggtgctggtactttttgtttgcttgtttttcagcagttgccattgaaatgtgtttcttttggagttggataggaaaaacctagattcttcctccaaggtgtagtctcaactgtgccccaggcatcactgtttatgatggattaagggtgtggcttttcccagataatgagtccccctcccccaccccccacaggccttaatatctacagctcctgtcaatagactggcctttccttccccgcgaaaagtttgagtcctttaagaatctaggtctaaggttaatttcaacgaaaggtttattttctctttctgcgaggacctatggaactacccagaacatataaagcagtccacaaggctcttcaacagcttcgtaaccgggcactgctagttcagaaactcactgacttctgaatgtccatttcacatttgcaggctgcttctctgagtcctgagctcttgtctcaagatgacttggctcttaattgttgtctgatttattaccggtttgctttgcagtttaggtgctggacaatgattcttagaaatccccacataaggatctacatgcagtggcagtgaatctcaataactgccttttcttgaatctgaacttaatttatatataaagcctactttccggtagatcctgcatatttcatctcagccaatttaggactgagatgccccccctttctctggggttttgtcttaaatttctggaggggacctgattgtcacgcccctccgagtgaagagaccaccaaacaggctttgtgtgagcaacaaggctgtttatttcacctgggtgcaggtgggctgagtctgaaaaaggagtcagccaagggtggtgggattatcattagttcttacaggttttgggataggcggtggagttaggagcgatgttttgcgagcagggggtggatctcacaaagtacattctcaagggtggggagaatgacaaagaaccttcttaagggtgggggagattacaaagtacattgatcagttagggtggggcagaaacaaatcacaatggtggaatgtcatcagttaaggctattttcactcttttgtggatcttcagttgcttcaggccatctggatgtataagggcaggtcacaggggatatgatggcttagctcagagtcctgacactgatacagtgccaggatttgaaggcgggtgtggcttacctgatttcatgtacaattcatcccatagggaccttgttccttggcctcaagttgtaggccctttcatatctctgtacggtcaagaaacatggtggttcccttgtcattcttcatcctccaaaaacccattgagcactgtgtttgctggaggcatgtgggaaattattctactgtaccctatatcctgctgaagtgcctgggtactgggtggctagctcatgtccatttgctaagacacatgctcacgattcttgcctgggtctgacataactttggagtcttgttgcattcctgggctggactctggaatgggacccaattacttctgcacctggatacccccaaccttctctgttgtggtggcggttctttcaccatcccctcctctcaggaacacactcttgtttctactttacattctccatccagtccaggaaaatagtatctaggctcagagacggagaaaatagtgtctatatttcacatttttttccaaaaaaaaaaattataattttccgtgcctggacttgagaatttgaaaactccaaaatcctccaggttcaaccacattgttcccaattacaggattttcttattaaagttgaatagtgttccattgtgtgtatattccacatttttgaatccgttcatctgttgatggttacttaggttgattccatatcttgtctaatgtgaatactgccacaataaacacgggtgtgcagatatctacttgatatactgatgtcatttccttaggtatgtacccagtagtgagattgctggattgtatggtagttctatttttatttttttttgaagaacttcctgctgttttccataatggctgtacctatttatgttcccattaagggtccaaggtttccctcttttccatattctcaccaacactagttatcctttgtctttttgagaatagccattctgacaggtgtggggtgatagcatattgttttaatttgcagttacctgactaatgataagcattttgtcatatacctgttgtccatttgtttcccttaagacatgctcgttgagacatggacacggggaggggaacatgacagaccggagcctgtgggggtgggggcgtagggagcaaggggagggagagcattaggacaaatacctaatgcacacaggacttaaaacctagatgacgggttgatagatgcagcaaaccaccatggcacatgtatacctatgtaagaagcctgcacgttctgcacatgtatcccagaacttaaaaaaaataaaaaataaaaattcagttccttaatcacagttgccactgtgattttactttgtcatattttaaaagcttttttatttcaaaaaaaaagtctgttgaggtcctttgcccatatttaattgggttgttgtattgctattgagtttaaggtttcttatatatttttggatattaatcagagtgaagggacaactcatggagcaggagaaaatatttgtataccatatacctgaaaagggattatttccttggctgtgcagaagctgtttaggttgatgcaacttcatttgtctatttttatttttgttgcctatgctcttgggttcatatccaaaaaatccttgcccagaccaatgtcataagcttttagttgatgtttttttttttttttttttttttttttttttgagacagtcttgctttgtcacccaggctggaatgcaatggtgcggtctaggctcacagcaacctccaccttccgggctccagtgattctcctgcctcagcctcctgagtagctgggactacaggcgctcaccacaacgaccggctaatttttgtatttttagtagagacggggtttcgccatgtttgccaggctggtctcaaacccctgacctcatgatctgcccgcctcaacctcccaaagtactgggattacaggcatgagccacctctcatagtccatgttttcttctagtagttttagtttcaggttttacctgtaagtctttaatccattttgagtcgattcttgtatataacagataagggtccaattttctttttatttatttattttttttgagatggattcttgctctgtcatccaggctggagtgcagtgatgggatctcggctcactgcaagctccgcctcccgggttcacaccattctcctgcctcagcctcccaagtagctgggactacaggctcctgtcagcacgcccggctaattttttgtatttttagtagagacggggtttcaccgtgttagccaggatggtctcgatctcctgacctcgtgatctgcccgcctcagcctcccaaagtgctgggattacaggtgtgagccaccatgcccagctgtaagggtccaattattaatattcccaattgaatggaagaagtaaaaggaaacaaaattaaccatattctcacttaaagtcattgttatcattttggcatatttcattgggttcctttttacccgaaatgagggttttctgctatttatttagatgtgatcgtgctatatttatgacttttcacccttttttactatcacataagtgattttaggttattatagacacactttaaatgttcacataatgaccacttattctaaagttaggcatttagttttttatttttgttgttctaaataacccagtagaccattttgtttccttttagacagcttccagcgcatgaaattattaggtcaaaggatattacctttttttttgagacggagtcttgctctgtcgcccaggctggagtgcagtggcgcgatctcggctcactgcaagcttcgcctcctgggttcacgccattctcctgcctcagcctcccgagtagctgggaccacaggcgcctgccaccacgcctggctaactttttgtatttttagtagagacggggtttcaccgtgttcgccaggatggtctcgatctcctgaccttgtaatcttcccacctcggcctcccaaagtgctgggattacaggcttgagccaccgtgcccagccaggatattaacattttttaaagggtctttatatgtatcgcaaaaatacttagcaaaattattattattattattttttaccagtttacactgcccaccaagaagctataaggacacctaaattgtcacataaaactgtgtatggataaatatctctattttataaaccacttggtataaccaaaatcctgcttttgagatattaaattttgaagctaacattcttagcatgtttttaaaataatactgacttcatgagctaatacccataatgataaaatgattttatattccaggaaagctgccatgtgggattgaatgttttatatatgatacacttttatctacatatgttgttatacagtcattggtacctttttattagatgaatttatttcatattcagtttccactgaattgtattcagcttgactacaaattagtcaagcagaataagaatgtgagttttattgtgactaatatatatttggagtctagatttggagagacaaggggtgagtaaaactgtgtgcctactacctgaaaggaaaggttttttttttttttttttttttccccctcaagggaaacaattacggagactgcccaggcatttaatattttattgaaatattctaaaccctcaaatttcgcttctacattttatgtgatgcatcagaaaaacactattttatttgttttataattctccaatagggaaatttcaacacattgtaagtttctttatttaacaacatcatctagcttttaataactgactttcatacacatttttaaaagcaggctaatcgttatagcttaatatatttttcatgagatttagtgataacatgatcacttataccagtagtttatctcctgaatcattttaaaaagtaatgtgcatgttttctttatatttatatacaattgggaagcttaatatttatgaaaatatgattgacttttttttgtcatttctcttcaaagccttaggctttgcagttatcagtagtgcagttccaagatgcaaagtcataaacttacctttcattctctttagtaggcttaatattttgaatctagccataggaagcagcctgaaacctctaatcgaaatcaaagataacaccacaggggtacaatatctctaatttgtcttggaatgatgcggtagcttcccttgactgctgtgattaaattcattctggtttgttcagttaatgagattagcacatcttaacccataggaaatattgtctttatgggcctatgactctgaacagattagcatcatgatcagaaaaataatttttaataaatgattacgtgtgagtggtgctaggctaggatccctacaaatctggcaagagcatattccttgaccttcagcattatatgactttataagacacagcattttctcaggcatgggtataaatacagttaaatatgtactataaaactaaagaacagcctgaaatttaagaactacaagaatttgtgcttgtcattaagctggagataaagttaacatcctgagaagatgtaaaggcgacagtgatacacttctccttgtttggtaggatcatttccacacttgtctgtacttggaattgtaaggtgatgagtcccttaatgatttcttattgcaagtttgaacctagtgtatttcatggtaatagactaaggggaatgagtatatgaaatgagttccagtgtattgatgaaacttagagttgcgtagagtggagcatagcttagtagaaacttgagcaagttactgtagcacatggtcctggttccaattccagcaacatctgttagttttaggacttggtgcaacttgttcaaattttctgtcagactctccattggtttaaaaaataaaattcaaaatattgacaaatattgccttcctgaattttttggtgaatattaagttagatgatgtatataaagtgcctggcccatagtaagggctcaataaaagtagctgttggtaccgcttttaactaattgttgttaaattgattggttaattatatatttccctgccacttaactgtcactcaacagcttttcctcatttcctgcctacctgattggaaatcattatgttgaatatgtctagaattatcactgggcctgctgtattccctgggtggtatgtttgtataggttgaaccactaaagaaaatcttttcggatgagttactttcctatgtcaccctactatttcctagtgggaactttaagttccttcagtctggggtcaagactagtcttagtataggggacattgggaatattgaggatggcatgtttaagtaacattgtatgtattggtcaagaaaaaacaggcaagggatagagtacatcaaaaccagaaaacctatgtacttacctttccatttctgtctttattagatatgttgagtttatttcaagtgcctctatagaacatctacagaacattaatattaagaatatcatgaaaagggatacatttttaagagcctaaattttggataaaatggaagtcattttcttttttttttttttttttttttttttttgaaacagagtcttgctctgtcacccaggctggagtgcagtggcatgatctcggctcactgcaacctctgcctcccgggttcacgccattctcctgcctcagcctcccaagtagctgggactacaggtgcccgccaccatgcccggctaattttttgtatttttagtagagacggggtttcaccgtgttagccagggtggtctcgaactcctgacctcgtgatccacctggctcggcctcccaaagtgcggggattacaggcgtgagccaccgcgcctggccatggaagccattttctaacaacaaatttaatttgtgaaaagctggtagcatgttaactctagaatgacaattttttaaaaggaaaattccaaagttaaagggaaaaaatattggggtagtgccagctagtatcaggatttatactttaaaaatgcataagaaagaagcaattaccagtgtccaaataagaaatgagagtaatagaaaactcagatttcattgtattataaatttaataaataagttacacaattgccgttcagtgcctgaaattgatttttctttttttgaggtcaaacttcaaccatgtatatgaaatgtaagagcaactttctaagcagaattaccctttctgatttccttgggttccttttggttctttaatctgtatgactaagagtgtggattggctgacattatgagatgcaattaatttacatgcttaagttaggactataccatcctgtttccatccattcttgatcacaagcatattacaaatgctgtgctggattatctttactattaagacatactgcagaaagccctgcaggtaaagaaaacaatctagggcttaccttagaggcaggaagaattgcatgttaagaaagctgcatacactctggctttttgctctttgagtttagctcaatgtcttcctaaactttggtgtgcaggaggtgactacgcagtatttaaaatctaatccatattatgtgtatagtatggatggtatagcaattttccaggtggatttttgacaatattttattttttactattcatgttgactttgaaaaataactacagggctagatttgattcaactgtccatggttagaatttttaaaaaagtttttgactctaatacaactgagttccatctacagaaagaatgcacatatggatacggctgtccagaagatcaaatatccttgtactgaagtatatctatatttagtcattattttataaaagtagtagaaaacaatagtggaatataatatgtggtctttggaagaatgagaaatcatccttacccattaaacacagacccaacacttaatgtatttccattttgatagtgacaagttttgggtttgggatgatgtgtcagccagggtcagttaacagacagaaaccacttgagtgactgtagcagaaaataatgtaacaagaggaattgggatctaggtattgaaaaattgacaaagagaagaggtagcaagtgcacaaagtagctaccgctcctagggctgggaagacaaaaggttagaattactaacacttagaacccttgaggaaggactctacaaagctgagctcaggtctgagtagggggctgctacgtggctggtgctaccctctctgggatagcaggaagggcccaatgggactgaggcccggacctctgccagccaggtggtgctggtatttctgcagcaggggcgatgaagctgattctctaagcttttgaaaaacaaaacacaagctaaattgaatagcttgttactaaaaagtgctgctgcaggcatgaagaagcacgtctagggaactgctaataaggacagtaagtgcatgggaagctagtgtgaatgagtaaatcctttgtccctcctccaggcttgcagtctccctctattgctccctacctttagattctgagagtcagtcagtaaagccagaagtacggtttgcagagtctttgcctcagcgttgcaaagtagggtttagaagggtgtgttggtatggctctgaggaagataaaatctctaaccagcatgagtgctaatatgtctaataagatatatggaaaataattattaagtatttgactgaatttcaaggattaaaaagcaatacttaaggcaacaaaaacatcttatatttccattaaagcataatttttcttacagctccttcacattggcaaaattagtttgccctcttgaatttttcaaagatgtgaattatggcaagtaataattgctgcctactattgaatatctggatgttgtagaactgccattgtatcatatttaacttatttttgagagtgttagatttcctctgatagaagatattttttacttttccaagattaatagtagaaatattgaacatcaaatcattttacagataatactgtcctaacattgcgtaagtatacaattattcatagactcagaaatcataattgtcttcacagaaagaaaccagttcagaatactttaagaactatttggaatgttagatttaaaatattctgtagccaaggtaaagcaagttagctaaaattccttttgtttctattgtttttagaactagcttcaaagagaaagaatttgataaatacttagtgtccaataggctctttcatacagttcaaagatgtagactgacactggcatctacagttcctagctgtacttactctggtattttttgccagctgccttcgtggtttctgcttcatacctgtttgtattcataaataactcaatctaagatttttagctttttaaaaagaattgcatacaatcatcatcagattacaggtttgaaagaaatcttagtttttttctttttcttttttttgagatggagttttgctgtcgttgcccaggctggagtgcgatggcgcaatatcggctcaccgcaacctccgccttctgggttcaagcgattctcctgcctcagcctcctgagtagctgggattacaggcatgcgtcaccacacctggctaattttgtatttgtagtagagatgaggtttctccatgttggtcaggctggtctcgaactcccgacctcaggtggtcttcccacctcggccgtctaaagtgctgggattacaggcgtgagccactgcgcctagcccagaaatcttagtctttttaactcagttttgagattctgccatatacctggcactgtagttaagagatggcatataaatgggaaaaataggtatttcaaaagcaatcaaaagcaattacaagactatatagtatgtcctaccacgggggtatgcatgggagcagaaggaagaagagacgaattttgcttggctagggttgtattggggttgaaattgatatcaactatagactagaaacttaaagggattttcatgccaacaagagtacaacaggccattcaagtccatctcttccaaacattgattaaacatcttttataggcagacaatcagttagttgctaagaagactaagctgaaaaaggcttttttttttttggccctgttggagctttcagcctattggctgattaaaaaaaaaaaaaaatgctgaggagtatgaagtcacaaaccaattgagttcaggaaccagtaagtagtttgacatgaccgtaatggaggttttgggatatgggcaattggcaaaaaattgaaaaggatgcgggaaaggtggactggggatacaatgtggatggatgattccttgctcaattgagatgaatgtgttcaaaaaaaccaggaagtttttttttatgttttgcatattagaaagttacatttggtggctatatgcagaatcgtgtatggggagagtacaggtgtggaggtcactcatgaggctaatgtctattcaaatgggagaagaggaaggtctgaaaggcaatcactattggaatacatgcaagtacatctagcattgttctgtctttctgaagatgtggaaatgaagctctctcagaattaaatgacaacatgccatggctgtttgttagagggaatggaagtagagattgaaggtcttgatttccagctgatcatcctttttatggtaccataccactcacccagcctgttgaactggaaaagattatgaacatcaggcattaacctaccaaagtaaagcaaaacaaaaacgctgaacttctccatatttttaaaaatatgtgacacatatatgtttattggaaattaaaatacagtaaaggctctttaactgtcattcaataaatattttttgaatgaacgacgatcacttgtcaataactggtattaaaaaagacaaatattaatggtgatctttattcaataatttcataaaatgggaacaaagtggtaatttgccagtaggatgaggagggcatagcagaggttgtctaaccttttggcaagggcaaagtcaaactggtgaataagcaacacaagctgtgatgagagtcatgtgccatatgtaaatggtgactctttcttcctccaatgctgtttatcaccacaggcttcccagcggcccaagaacagtctgccgcagtcactggcattaataaatgccatctctacctgaatgcccttcttttcaaatttttaccaaaaggaagatagtagactttcagttttccttctggctgtgagaggcatagggagaataacggtaacagatgcaggaataaaaaggcttgatacacatggatattatgtcatgagggattcaggagtttatattaatatacaaatattagttgttttttttttgtttgttttttgttttttgttttttttttgagacgtagtcttggtctgtcgcctaggctagagtgcagtggtgctgtctcaactcaatgcaacctccgcctcccgggttcaagcaactctcctgcctcagcctccccagtagctgggattacaggtacctgccactgtgcccggctaatttttgtgtttttaatagagatggggtttctccatctcggtcaggctggtctcgaactcctgacctcgtgatccacctgcctcagcctcccaaagtgttgggcttacaggcatgagccattgcacctggccccaatattacgatttatcctgccctacctcaccactcttttcatgattagagatggaaaaatttgatattatttaaaaatcagtaagattctatctaatcaaaccattggcagtataattcacaacttttttagagattttctaaagtaatacagatactgtagtattgtagttttgtagtatagctacaagaaaatcatactgtgctctgaaatgctatcttagtaacatattgtgttaatggattataatggtaatcaaaacctccatagagctacaggtttgaactctaacattctgtcgaagttaaagattaatcagtttaacaccatattatttttattatttttgagacgtagtctcactctgtcgcccaggctggggtgcagtggagcaatctcggctcactgcaagctccgcctcccaggttcatgccattctcctgccttagcctcccgagtagctgggactacaggcgcccgccactacacccggctaatttttgtctttttattagagagagatggggtttcaccgtgttagccaggatggtcttgatctcctgacctcgtgatccgccctcctcggcctcccaaagtgctgggattacaggcgtgagccaccgcgcccggcccattcctagtattttcaaatagaaatctgatgcctttattactgtaattagaggaatgcttatgtttcaggttgggttttggtaaagcccatgtggagaggagaatttgcatgaaagtagtttaattaaggaaatgttctcagggatggcaagtaggtgagcaagagaagtagaataggaatggggaagaaatcatgcaaggagcaatcgcaggcaaagtgccagcctcagtctggttctgcaggaaaacctgggcctaaactatgcttcagcttgttgcaacttgatacagaaggagctgggcttttgtattccagtagtcaccagtcattgccttaagactaccctaaggtgacataaacaccaaggcacttccggatctctgtttttgttggcaaagcagctttactagcctgaagacagtcatctaaagagatgtagatacagaagttttgagaagcaaagaccacaaaagccaaggaggtgggcacgcagaagtgttaatggaatcttagtggatctggataaaacacgattttttggctataacctctaaagggctaactttcagaagattacgtggacccaattaagcacttacctgaataattttgaaacatctctaattgtactatagctagagttaaaagaaaaaatattttctaatataaacaaaaagttcagaattatagcattattaaagaagcttttttcaaatgttagcattcctgcttcttgactttacatttttccggaacaaaatagttttccaaagagtatacttaatgacttgtgcagatgaattctaaatgataaccacagggctcttggacaagggatcatttaaattttgagttcttgtcagtcagacatatcaatccatatacatttccccaaccagggtgtcagaagtgtagtcaagtgagttttgtaatgatacttctttgtttacatctagctgcagaaacctcttaagactgattctgcatcagaataattgctagagggaaaagggaagctgtgattatgaaataacactgttatccactggcacccctttgtgtctatcttagttgaagctttgaggcacttctgtgtctattatttgattttaattggcaatggtattgattataaatcatttgacagaatataatttttatcttaaagtttaaatgtacctagaggctacaaagattcctgcgttcaatgaaaacattaaagtaatagtgtaagtagtttaaatgtgccccatttggcacagattagtgtcacctatggtacaactcagtcaaaaagtgaatgtagctgaaaactgaaactgttcaacagctccaaatttaagaaacacggaacattcactatgtgcaatagacaatgctagttttagtaggggattaaaaaaaaatatctttcagccaggggctcataaagtagtgaggaaacctacaacaacttcaagtcagataatgacaatatgtcattaagggacatgaacaaatgaccgagagaccgcaagatcaggagggactttttttggagttggttataaaggaatggcaaggcacatgggaatcaagaattcattcaaacagagccttgaagaaaggtgttggtggagtggaaggctagaacacaaaaatacaatctacagaataagaaagcactagggggcaactgtggttggagtacttacaagaacggtttaggaaaataactagttgtactacatagactaaattggataactgtcaagatttgaggattataggtgaagaaaccattttagagtttattataactgacattttgtatctagagacaacagggatatcagtattgatgtaattaaaggatgtggcaagaatgaggtgaaaataacttatgtcttagggctgaaaaattgagaggatggtggtatcattggatatggttagaaatagaaataagcaaaactatgatggggaagtgatttgtatttgggatatattgtctttgatgtattgatgggatatccaataatctccggaaaatatgtctggatctgaggagggaaatcagtgtgtgtttgataggtgtagcagtgagaaagtatcataggcaagataccacaactaaagaaaatggtttgggggtaatcaatatggagtttaagccatgggggcagatgatacggcaaaaggatattatacacagttaaaaaggaacccaaaaccaagtcttggagaattcacatttaaatacgtgcagatatagagaagccagcaaagaagtgttaggagaagtcacaggaaactgtaaagtgtctggtcacagaagcagcaagaaaaacagtttttaaggaggtgactacattgaccaaaggcagtgattgaattgaaatttacttggggtctgagaaaagaccattcggttttctggttgctttgactaattttaaagtaacaatttcagtggagtagtagaccataacctataaatgcattgatgtatttatttattcattcactcactaattcacttatccaatagtcattcatttattcttcggtgcttacaaccgggcctggcactggattaaagtgaaattagaagtagataaactggtagagatagccaaaacatatctccctacagaagggaaaagagcagaaaattatcatggaaacactttgcatagagtttctcacagcaggttgaaagtatcctaaggttatagcagtgtaggctggaggaaaaggagaaaatacagactaggcaggacaggcactggggaaattcaggtgtaactaagaagagactgagtgctgggagacagggtgtaatctgttaaatagaaacataggcaatagtaaatcagggaaccagaaagagttcaagagtcgatgaagagggacatgtatcaaggtctcgatcgagagggctgtgattcaaggcagagcctccattccagagggagcttaggatactcttctggttttctattactatgtaacaaaacaccccaagtacagtggcttaaaataacatctcttttatctttttatctgattttgtgaatcaggaattcagccgtgttcagcttattgatttttctactctgtgtggtgtcagttgacatcacttggcagaattcagctagtggatgtgctggtctggagggttcaagacagattcacttaatgcttaatgccattgtgagaatggctgaaaggctcagttcagcagggactgtcaaccagaggacttgtagatgtcttctacagcatggtggtttcagggtagtcagtttttatgcatggcatcttagggctcccagagtgagtattctaagaaacccataaagaggctaaaagttactaataatgatctaatcttggaagacctataacatcatattcgttgcattctacttggcagacaagttgctaagacaaatccgagctttaaggggagaattagatgctgcctcttgatgaaagaagtgtcaaataattttgtggccatttctagtccatcataactgctgtaaatttcctcctcctaccatggtattgagtgatgcatatctcacaggaggagagtgtgtcagtgactctagctgagaagggcagaagaaagaagatccttgcacaaacaagccaggcgagagagaaaactggcagtttttaggaaagaaaagagatgcatcttggcaggaaacaattgatggtagccagagttcaaggctcatgctgaccgttcattcttctacattttctaagctcaatctttgtatcaatagagaatatcagaaaacttccttggggaatcttactttggctctctgtaaaaatgaacttgtcgcaatgttctaccctcaacaatgggtgaacacagatttaagaaaaagacatgaaaagcttatctgttcttttgtgaaagtgccaaacactttctgttaaggttttcattgttgttaaagtgaaaatttggtatgacagctgctgtgagggatagacttaaggccttgcaactcaaattatggtctgcaatctaggagcaccagttgaggttttgttagaaatgtacattttcaggcgctatcctagacctcacacgagtctgcacttgactaacatcttcagaggtttcatgtgcaaacaaatgttgagaaactctgatctaagggatgtttcattattcagatcattgcaaaggacttgttaggttcctgttcttggtcttgtccctgtggacttcagattgaaaatcttacccttagcttaggctaagataaaattcctttccttttatttgatggcaattatacataacatgtcattacttgatttttattcgactttggagaagcaaagggttttggctaatttttagtaactattcttagcttttacaatgttatcattttatgtttgcattttttcctagccttatttagattctagacacagaataggggactgtgagtgctgagagtatccttagagaataaccactgtaacctacttcattttcatataagaaatgaatgctcagaaatgtgccttgatgtactcatggctacttaatcagtggtaaagctgagcctagaattatttcctcaaaattgtagtcctctgtacacttggatcagaattaacaggcaatgcatgtcataacgggctcatccaggtggttctaatatatactaaagtctgagaaacaggcctgagtgtagcttcaatgtctgctctctcactctaatgcctactgcctgccatatctagatgcctgtgtgtatgtgaacgaggagggaagagaattaaatcctagagatgttggtagccaattatctcaaaagcacatatttaggggtcagcttttaaaaggaggaggggggcttattcccctgacatttgagcaaagcaggaaagggtcggtgatgaaatgccatgtgtcctgaggacctacaggcctgggttatatgaccacttcaggaattgcatagcaatcaaaaagggaactaaaagaatcggaggctgggtaaaatcaggactaacaattgataaagcaattatgatcaacagtgagtgagagaaggagatttacctgatggtgaggtggtagccaccactaagattagtttaaataagattagccaccactaagagttttaaaatgaatgcatgaggcactggagtcttccattgcttctcttgccctccttgatgtcttctgacaggagccatagagatctttataaaacacaaactagatcatatctctcctacccaaagcctgtaaaagcatctctattacatttagtttaacatctctactgtggcttaccccttatccttctttgcccactaacttcatttagcatccacttcccctacttccctttgtgcatcttgtgcctgctatctgtaattcttccctttttataaaatctcctttttaagatcataccttgaattgtatctcttcagaaagggcttcctatagcttagccttaaaattctttttcagttgactttatttctaccttagcatgtaaaatgttgtcatctcttatttgttgttcatcttcttgagacagtaagctccagaaatgcagaaactaaatcattattcaatctaacctcatgtgatatctgtcacattgtagataatacttgaattttaaaaaggggacagaagtttcaagaacagtatactgtggtttaagtgagcaattcactgtgtgtgatccatggggtaggatggttcgaggtaggtgagaaagcatgaactggccatgaacatggacgcaaattgatcaaagtcattgcagcttagcaggtcaaaaagctgtgaggtcagagcatcagttaaaatgttcaatggtagttggtcatgatggcattagcaacctttaaatttaaagggacttaagtcacatccagaaatcggggatgacaagcctatagtcatcctctcttgaagtcttctgctgatacaagtaatcattcagtctgttggtctctatccccatgtcaccaccaacgatgactgggatccagtcaagcccttggatatcatgtcctctctcgtgtccttttcataccaatttaatcatgcctggagtgcccagaagcatactttcagtctcgcctgctttgacacctgactcattcatgccttaacctactgtgctagtgttatgatggggagggagggggtgactgagtggatttgacctcccaaaccatattctagcaagcaaggtacatcttaactctggaattcttctaaacctatatagggtttctgaaacttagtctcagagtgggagtggaatgatacagtactttgtcagaagctcataacaacgactgtgtcttaccataatccattacaatactgttcttgttccagttgaacagctggaagttgaaaaacatttcctttggaatgagtcaaactgtatcttacacaatcttcccagctcttatttacgagatagataatgtcattggtgctcaatatactaaggatttttcaatgcagggctctaatcttatcaatagattccagggaattactgagaaacacattatttgatccttgatgtctctttccttgtatttttatagtagcacgcttgaggaagtacacatatatagcttccaagaatgagggaaggcatcagttaatatgttaaaatagaaacctcccacttgatcttaagtatggggagggcgggggaaggagacaagccttaagcctgtttaccattgcaggtaaacaaacatgaagatcaaattctaagtaaggagagtttgttatggaatagctgagactgagggcataaagacaaccattcaaattattctagggtttcagaagacactgaagaaagaatagggagatgaactgttggtgaagcagagaggaaaaatagaccaagattaagagaaaaaaaacacgggaaaagattgcaggttggaggagggtgggtctatccaaggctgaggtcgaagcttacggcaaggatgcaggggaagaatgttttgttaatggtaaatagattgcaaaaattctgtagtttgcctgttcattctgatgatgggttttgtggttttttttttttttttttttttttttttttgctgtacagaagccttttagttctatctcagttgttaatttttagttttgttgcaattgactgatgtttttgtcaggaaatcaaaatctttgcctgtgcatatatcctgaatggtattgcttagattttcttacagggtttttatagttagtgggttttgtgtttaagtctttaatccatcttgagttaatttttgtataaggtgtaaggaaggtgtccagtttcagttttctgaatatggctagccagtcttcccagcaccatttattaaatagggaatcctttccccattgcttgtttttgtcaggtttgtcaaacatcagttggttgggtattagatgtgtgatcttatttccaagatgttggttctgttccattggtctatgtgtctgtttttctaccagtaccatgatgttttgggtagtatagtctgaagtcaggtagcattaggcttctagctttgttatttttgcttaggattgtcttggctatatgggctcctttttggttctgtatgaattttaaaacagttttctttttttctaattctgtgaataatgtcaatggtagataaatgggaatagcattgaatctataaattatacagtatggccattttcacagtattgattctatccatgagcatggaatgttcttccatttgtttgtgtcctcttagttccttgagcagtggtttgtagctctccttgaagaggtggtgcacttagcctgttagctgtattcctacttactttattctctttgtagccattgtaaatgggagttcatacatgatttggctctctgtctattgttgtaggaatgcttgtgatttttacacattgatttttgtatcctgagactttgctgaatttgcttgccagcttaaggagattttggggtgagacgatggagttttctagatacacagaagagacagtttgacttcctctcttcctatttatccttgatttctttctcttgcctgattgccctggccagaaattccaatacagtgttgaataggaatggtaagagagggcatccttgtcttgtgctggttttcaagggtttgtcataccaaaacctacagccagtttttgcccatctagtatgatattggctgtaggtttgtcataaatagctcttatttagagacatgttccatcaatacctaatctactgaaggtttttaacatgaaaggatgttgaattttatcaagacttttctgcgtctattcattcctttgcattcttttttctctaatcttgtctgctggtgttatttcagcaagataatcttcaagctctgaaattcattcttctgcttggtctatttggttattgatacttgcggtagcattgtgaagttcttgtgttttttcagctcccttgggtcatttatgttactctctagactgataattcttgttaacagctcctgtaatgttttatcatggctcttaacttctttgcattgggttagaccatgctcctttagctcagtaaagttcgttattactcatcttctgaagcctacttctgtcaattcagccgtctcagcctctgtccacttctgtgcccttgctggagaggagttgcaatcacttgcaggagaagaggcactctggctttttgagttttcagtgtttttgttttttgattctcatcttcatgagtttgtctagtttcaatcttggaggctgctgacctttggatggggttttaattgggattttttttgttgatgctgttgttgttgctttctgtttgcttttttaacaggtccctcttctatagggctgctgcagtttgttgggggttcgctccagaccccattcacctgggtcccttctgcacttggaaatgtcacctaaggaggctgcagaacagcaaagatggctgcctgctccttcctctagtatctctgtccctgagggtcactgaccagatgccagcaggaaccttcctgtataaggtgtctagcgactgctgttgggggtgggtctcacccagtcagggtgcacgggatccaggacccacttaaggaagcactctggctgccccttggtcgagggggtttgctgtcctgggggaatcccacttgtctgggcttcccggattctttagagccagcagggtaaagactaagtccgctgatctgcggagaccatggccacccctccccctaggggctcaggtccaggggaatcggagttctttccctaaacccctggctggagttactggaattcctgcaagcaggccctgcccagtgaggagggatgggtcagagtccggcctaatgaggcaatctggccattatttgccatagctggtgtgctgtactgcagggaattcctcctgggttcaaactgtccagtctccctcaaacctgaaggggaaaaatggtggactggagctgcagtgatggctgctgccctccctacaggagctcagtcctctcagtaagccggtagccaccgtgatggctgctgcccctccccacagcagctcagttctcttaggtggcagttctcttagatgccgcccctccccgggagagctcagtcatttgctgtaacaggcagctgcagtgatgatggccgcccccgcccccggaaactgagcagtcttaaggagtcgtctccatccgagtggcctgcgagaatctgcacagctgtgttttgagacccaaggccctgttggcatgggctcgcaagtgggatctcctgatctgcgggttgcacagatctgtggaaaaagaaagatttcccaggcagggtaggacaatcactcactacctcccttggctgggagtgggagcttcccttgtcgcgtttggctcccaggtgggccatggcaccaccctgcttttccttgcgctctcatgccaactgcctagtcagtcccagtgagagaacctggacacctctgttgctggtgcaggattcactcacggttttggttcttctcagtgggagcctctgactgcagctgttcctagttggtcatcttggcctctctccatatttttccatttttgatgtaactttaagtttttgcttaaattcccatattggatattacagtctaaaatcaagagaaggttaatgtggaccgagccattatttaaatttaaggttcaaagaggtaggtcattcagccaggtgagtgagcaccaatcttttaaaaagttggttaactatttgatagtttccacttttcaagctgataatgatattttaaaccaaggtcatttcaatttccttttggttcaatatttttggaaagttgctacctctttgaaataaaaatattttgtacaggattgtttacaattagcaaatgtttgctgataaagatgaatcactgaattaggtaccttttgtagttatgtaataaagctcttggtaaaaacttctatttaagcagttataactaatttttcctattgaaatgtcaggtacctattaagattttctcatagggcaattttaaattttttctttgagctttgtaagaaaaaaattgtcaactctactttcctttggctcttattcaactttattttaaaatgcatttttctagaaacactaactaaaggtgacagttttagttcacagggaactatttttgatttactatttttgttttggaaatgtctgaataaaccactggaaattatagcttataatgaagaaaacaagataaacacactttttatctaaagtgacagtaaaaatctagcaaatgggagaaaaataaagtcaacttttttttttttttaacttctccaattgaacgtcaaatgaacatattgggcaaggaatacaaccttagttgcatttacaatacagtggctacaacagaagagttaaacactaagtcttacgaaaggtagctttagaaatatttgaaagttggccgggtacggtggttcaggcctataatcccagcactttgggaggccgaggtgggcggatcacgaggtcaggagtttgagactggcctggccaatgtggtgaaaccctgtttctactaaaaaaatacaaaaatcagctgggcgtggtggcatgcgcctgtaatcccagctacttggaaggctgaggcaggagaatcgcttgacactgggagacggaggttgcagtgagctgagaccacaccactgcgctgcaggctgggcgaaagagtgaaactctgtccccccccccccacccccccacccccccccaaaaaaaagtgtgtgtatgtatatattaaggttgacactgtatttaaaaaatttctatgaaactgacaaaactattgcttcgttaattcttttttgcaagattgcattggaggaactgcatggaatataatgactgtgttcttttctaatagcacatgagtcagatctctagaaactgacttttgcccatattcaatttcagcagtaaaataatttctagcttgatatttctcataaaaactcctagggctcttttaaaaatattttataaatatctttataatgtggcttaatttttcagacatcttctgtgtagaaacaaatattcatatgtatgtacacatattagctattgctgtgtaataagccaccttgaaactcagtaggttaaaacaaccaacatactatttcaaatacatatgttagccaggaagttcttcaccttactgctaggattactcgtgtgtctctagttagctgggggttggctaaggggctttgctgatctcagctcagctctgcgaaatgtctggctgtctgctagtctgggaaaacttcatctgggacaactagggcaacttgactcggttccacttgtctcatcctcctgctgtctagctctgatgtgctcttacggtaaatgcagaggcatgaacaagagagcaaaagtgttcaagcccttttgaggtctacatttgggagaggaaatgccagcacttcaattgcactctgttggtcaaaatgagtcaaatgccaacccagatttaagaagcagggaaatagataccaacttttcatgagaagaacagcaatgctacattgcaaagggtatggattcaggaaaggatgaaatactaggcccaattttgtagttaacttaccatttacagcagttgctcctggacagtatggcttccttgccaaatatttttgcatgcaaataattggtaaacagtgccaatattggtttttcctaaacaatactatgttaaagtgtcagtcaaaatatgaattaaaaaatgcaaaacatggtaagagcttctcaaaattagttatgtttgaaagggtgaaaagaaaagacaagcagacatttgcctaagcagctttgggtggttaatcaagtcggtacactcggatggggtgtcttgtacctctctagtctcatgttccatccgtccacttacgttccaagaagtggcttatagttccttgaacagtgcgtctatttcatctgatccttagcatgtgaagtttcctctgcttgactttatcttccctttacacttctacctgttgataacctgttcaaccttgtatattctattcagggattttcactctgttgttctctccagtgaagatatcttttatttgtgccagcaccatacttacgacaaaaaaatcactattaataggattataacaccatgctataattatattcgcttaaatgtatatttccttcctaggctattacaaaagctgtgaaaacagtggcagtatgtttttatcttttatcttcccatttttcttaggacagtatgatgcataatactggttacatttagttgaatgactatccccctcgtctgacacataaggaaaataagccaagtgctatgtaatttatcagtgttcacacaactggcaaaatttaaattatagaactgtaataaataaaggcctatttgcttccagatactatattatttaacttacaactacaccgaatctcacatggaagactttcaagtaaggaactggcacttttcagtggatcttaagaaatggctacactaaatgccctagttaaactttttcttctgtttactactacctcatttaatccttatcaacttcaaggattatatttcttatattttgatttatatagccttaagtttttgttgaatgatatttcttctttagttaatataaaaagccacatttttcaaatacattagagtgaattatacattcgaacaatttgcagtgtgctctaaaatagtatttagtaattgagtctgctgagcacactggagtcctgaggagttaatgaaacccccgatgtcaaatgatataacaataggaatttgggactttgaagaattttcctaatgtatatatgtagaattatcactgttactatctttccattacaaatgggacctacaattaggagcaattttattggcaggctatataactgtatctgaccttttggaaatgatagaagaaagaaaagatatattaaactatctttgtagaaaagatgacgtaaaggctcaagtaaaactcacctaacccttgcccctgaatgtgatgatagtcaagcccagcttaaacagcagttgcaaagtaaagaatggtgtagagatctgtagatacactgcctaagtccaaattagtatctagcacttacttgctgtgtgaccttattcaagttacttatattgtgtctgtttcatcagttgtaaaatgggggtgactgtgaacattaaaacaacccacaaaaagtacacagaagtagcgctgacataaaccagtcgatgtgtgtaactcgcatctttctgatacatgaggtagagtcatataaaaattgtaatatttgacaatatttgacttcagaattggaaattgcataaagttggaccactaaaaggaaataaagcatagcagtgacagacgttctcctttaaatattttatcctctgtgacttttgacagaagatcttctttaaatattgtatcctatgtgacatttatcttttctgtgtttccaatttctttgatttggaacttcctgtagacagacccttacaggcatggaagaagaaagaatgaataaaccaaggatgacttcccagtaggtggaggatgggaataattaggaagaagctgtgtcttgtcacctatattgtccatacacaactgcaccgtagggtaattgagaaattataagaatggtaataaatacgttttacattcattaattaaagtcatctttggatgccctttgtccataatgtttcctctactagatctgaagcctaaatatcacttttcttctctgcaatttccctggaactgagtactcatagatgtttgtctagtgagccattccattatgtcatggtatatgtgtgtatttgtgtgtgtgtgtgtgtgtgtgtgtgtgtgtgtgtgtataaacacaatcttttttttttttttttgagacggagtctcactctgccacccaggctggagtgcagtggtgcaatcttggctcactgcaacctctgcctcccagattctctcccaccttagcctcccaagtagctgggacttcaggcgcgtgccaccatgcccagctaacttttgtatttttagtaaaggtggagtttcgccacgttggccaggctggtctcaaactcctggcttcaagtgatctgcccttctcggcctcccaaagtactggggttacaggcatgagccactgcgcctagcctatagatttcttttttgaagaatcagtgttatttgcatgctttgaaacaaagtgcttcatcttgccaaccttgtaccataccgtttctgtcagaaaagcaaccattgggatagattgtaattagccttcatttccatcactggctatctcaaatgcaaatcatgtatctatgtgaatcaaaagaaaaactggatttaggcctggtgcagtggctcatgcctgtaaatctcagcactttgggaggctgaggcaggtggatcacgaggtcaggaggtcgagaccagcctggctaacaaggtgaaaccccgtctctactaaaaatataaaaaaattagccaagcgtagtggctcgcgcctgtaatcccagctactagggacgcggaggcaggagaatcgcttgaacctgggaggcggaggttgcagtgagccaagatcacgccactacactccagccaaggtgacagagtctcaacaacaacaaaaaactgggtttaactttcagaatgttcaattttataggggatatttaaaggtggtgtaattagtataatcatggattgtaatcattccacaaattttaaaataactttgtgaattacattaatacataaaaatataagataaagcatttaccataattttattaatatttcctttagaatacctggtaaaatgaatgagtactgacctaacttaaagataaaacaattgagacctagctttagaagttagttttattacaaaacatgttaaggatagacctgatcagacaatgaatcatgctgactttttgttaagcatacttctgggttcataacatcccacttacatataacaacttgatttccattaacgatggtgtggtttcctatttaaagttcgaatgcacatctgtttgaatcatttctagtgtacttaatagagtaacatacatattgggttctagttaagatgctttataaaatgccaaataacattttatatctggagagattataaaaacttgtattttgtagctttgctcttgaacacttgctagctgcaaggaataacttggctttttcttgatgatcttcatagccagattttcgtgctttttttggtagagagaagtctctacaagtatttgacgctaaggaataatgaataaatacctactgattttatctgctaaggtccacaaaacattccagtattttgatatcactattaaagaagacgacggtgttccagtgatacatatgattccttacaatgacatcaccagagatagaaatatgaggcatgggaagtaacacgtaggccttcatttattttctgatatggacatccctggcattgatctccttggctcaaaggaaatttgcttccatgtctagggtggtgaatgtctttggcttatttctttggccctactctccacttttgtcttccttgggaggctgatgtctgtggactacatcaacaggctcctttgccctctggctactagttggatttggccaatgagagccttggtaagagagggagagaggaaagaaattccatcacccaatatcaaagctcctgtcagataatcttctcttctcagttctctctctatgtagtaactagaaaccactctccttcttttcattcttaggagtctaagagtagtagtgacacttctctattactagttccagtggtttcattataccttccctcatttttataaacagtcccttattaaactcttctcagattaccaaagtcctgctatggccatataaatttcaaaggagagtgtcattctccacctccaggtgataacatttaacaggagggaatgtaatttatttaatgtttttattgagcattttctatgctaggtaccataccagacatcttacatttattaacccttttaattctcatattttgaagttggtcccttctgttactttgaggccaacattacaaggaaagttatagacgatatggattatttggcttagaaagtttggaataaacgtgtgatagctaacacttacagaatatatcttacaaagtgccatactaagttcacttaaatctttgcaatatcaccacaacataggtaatgatacatgctctttctatagatgaaaagagtaaggcacggagaagttacttgcccaagatcacactgcagagctgggagttgaacccaaggcattctgggtgtacagtcaacattcttattcatggcatcataccattcccccgtgttttccaaagcatattttatcagtgtgacttttttctaaattccctctgcataaatctaatgtatttcagtcactagtattctaactcaaaatacaaaaccagcatttttctatctttaggtgactcctttcaagagaaaactaacctatgatgccacaagtcgtcatagtggccattcttgaggggagcttccacatagggggtgtgaggaagctgctagggtgttgatcatattctgtttcttaaatctcgatgctggtaatataaatatgttcggtttgtgacaattcattgagctgtacacttaagacgtgtactttcctctatgtatattattccgcaacagaatactgctttattatacaataccttttccaactcatatttaagaaaacaaaaaaaaaatcaactcggaaagcttcctatttacatgaaaatgggttgccttatttttctgggagctggtcagcagcgttcttcagtaagttttgaatccccagttttgcaattctttgtggtatttgcgatatttttggtgtttccaatgtctagggatttgtaattgcagaagtatcttgactttcttagcgacagttatgtccatggcttgtcctttttgtaatcagaaggtcatgctaaattatccctgtgttctttactttctactgaaacgtattgatccctttggattttcaggttaaaagaccaatacaactctgaagaatcagaaaccacttaaacaccttcacaaatgcatttcctttctcaaatttttttactttgatttgttccactttgatttggttcactttatttatgccacttgtcaacctacctatctgtgtttctttttgaacactgtttgtgcttccgtatttctttatttcatactaaaaaggatttggaaggaatactgtctcgtttttaggtcctttcgtgttgtggtttgggttaacaaagacaatatatatgcagatacattaaactgagtaatatcagatatccactcagttcacttgataagggaaatcttagtcataaaatgaactgaagacagagagctacagggtcgcctggcccaaggaggaattcatgttttgtgtgcttcacaaaatagttctcatacacttgaaaaggaagccattaaaggttgaattttaaagaaaaaatattgttcttaggatataaaatgccacctgcaacaaagacatggtgtatgttgaagatgaaaggggagaacaacaaaagaatacttaaaaatagtcaaaagaacaagaaaagggaggaaaaagcaagtttctaagtgcatcctctgtaccatctgcattcaccagttttagtaattgtatagggaataatgccttcccctattgacttgcactcccacagggatgccaaactaatagaaaacattttacatgtattctgcactttctaatataatatttttatattatcgaaaagactttaacttgtgtgtgtgtgtgtgtgtgtgtgtgtgtgtgtgtgtgtgtgtgtgtgtgagatcttgcttcgtcacaaaggccggagtgcagtggcacgatctcggctcactgcaacctccaccttcctagttctagcgattctcctgcctcagcctctcgagtagttgggatcacaggtgtgtgccaccacgcccagctaattcttgtatttttagtagagacatggtttgaccatgttggccaggctggtctcgaactcctgaccttaagtgagccacctgcctcagcgtcccaaagtgctaggattacaggtgtgagccactgcacctggccgagttaaacgtttttacacctagaatttggtcaaagaaagagatgcagacaaatagtgttaaaatgaaacataaaaatcaatctatatttattgagtgcatacgatttgccaaatctgtataacgttcctatgtgttgcagttgaacctcacgggagtgctctggagtaataatttgagccccattctaatagtgaataaattgtgcctcagaaaggctgtcacttgcccaagataacacagctagtgagtgagtgagagacctgagttcagaagttagctatttctgcttctgaaacttgggttacttttgctatagtatctataattctatagagtaagttgcaggcaggaaaattagaaccatccaagagaaatagtatgttagattttacctggggtattcatactacagggagaataaaactgagcaccgaaaggtctataaagttacaggctaaatgtagcacatttcactaaaaaaaaaaccacatcagaccgtgggaacgggggtgggggagatttttactcaaaagtacttaaaattacttttacataagtccaggtgtgatggctcatgcctgtaatcccagtactttgggaagctgagggaggcggatcacaaggtcaagagatggagacaagcctgaccaacatagtgaaaccccgtctctactaaaaatacaaaactgagctggacgtgatgacacatgcctgtagtcccagctacttgggaggctgaggcaggagaatcacttgaacctgggaggcggaggttgcagtgagccaagattgcgccactgcactccagcctggcaacagagcgagactctgtctcaaaaaataaatgataaataaatagttttacgttgaaacaagcatatattaaaagaagaaggcaaaatctctaggaatttttagcataaagtatatgctttcaaagaaatttaaaacctgcaggcactgtgtaatttatactgccagactccagggtaaattccttcaatttcatttcctggaaggatgctctggtagaatattctgagaagcactctattagagaatatggtgaatatgactaatagaaattggatttcaattgtgatactttaatatatcattgactctgtgagtttcgaaaataatacgatagcaggaactgtttctctatcacctcactgctttctctctctcggtgccccagctaggtgtacatggaatcccctacctgacctataatcctttactccctctccattttggttacctccagttttaaaagaagacttataaaagaccttggtctatgtatttaagtttggcccacaaagcaagattctgtctgcgtttttgacctttgcctagactttgtctccaaacccaaacgtagtccttgtgtcttggatgctatatgatcctgatggctttgggattcatgttttattctgtactccaagacttctctcacctttcccagtctctgctcctctttttgaataaacagcagtttatcacgcacatacttcttggtctgacagacttcaactttctaccctggattttttcttttcataaaaacaagtatctctgtcagttaacagttaactatattttcttcaacaatggacacattgcagtgcataagattattttttgatgagtttaaaagtcatgctttgctcagataagtgtgaaattttgctcctggccaaaggagggaaaaaaacacatcattttaatggcattgtataccttcattcaatttgaaaaacaaattattacactcaaaataccaaattattccaggttagatatgaagttcttggcagcactattagaaagtgtaaatttattttcttattactagagagctttccttaaagtttcattaaaatggcactgttttaagatttatgtgtatattatgtatagtaaagttgctttgttttagattaaatttatggatacatagtatatttagggggtaaatagatatattgatacaggcatgcgaagcataatcatatcagggtaagtgaagtatctgtcacctcaagaatgtatcctttctttgtgccacaaacattccacttcaaatttttttttttttttgagacgcagtcttgctctgtcacccagggtggagtgcagtgatgctatctgggctcattgcaagctccgcctcccgggttcacgccgttctcctgcctcagcctcccaagtagctgggactgcaggtgcccgccaccaagcccacctaattttttgtatttttagtagagacggggtttcactgtgttagccaggatggtctcgatctcctgacctcatgatccgcctgcctcggcctcccaaagtgttgggattacaggcgtgagccaccgtgcctggcccaaattcttaaatgtacagtaaattgttgactgtaatcaccctcttgtgttgccaaatagatcttactcattctaactagatttttgtacccactaaacattcccactcctcctgtccccaactacccatactacactctggtaaacatcattctactctctgtctccatgagttcaattgctttaatttttagttactgcatatgagtgagcccatgcaaagtttgtttttgtgcctggcttatttcacttaatacaatgtattccagttccatccacgttgttgcaaatgacagcgtctcatttttttttatgactgagtagtactccactacgtatatatgtaccacattttctttatccattcatttgttaatggatacttggattgcttccaaatcttggctattgtgaatagggttgcaataaacatgagggtgcagatatttctttgacaaactgatttcctttcttttgggtatatacccggcagtaggattgctggattatatggtagttctgttttcagtttttttgaagaacctcaaacagttcttcacagtggttctactactttacatccccaacaacgatgtaccaaggttcccttttccacacagccgcatcagcattgatgttgcctgtctgttggatataagccattttaactggggtgagatgatacctcattgtagttttgatttacatttctctgatcaatgatagtgacaaccttttcatattcctctttgacatttgtgtcatctcttgagaaatctctattcaaatttttgcccttctttcaatcagatgattatatatatttttttctatggagttgtttgagccccttatagattttggttattccttgtcaggtgggtagttggccagtattctctcctactctgtgtgttgtgtcttcactttgttgattgtattccttgctgtgtagaagctttttaacttgatgtctcatttgtgcatgtttgctttgattgcttgtgcttggtagggtattgctcaagaaatatttgcctagaccagtgtcttggagattttatcccaatgatttcttgtagtagtttcatagtttgaggccttagatttaagtctttgttccacttagattgatacttttgtatatggcgagagataagggtctaatttcattcttttgcatatccatatccagttttctcagcaccatttattgaaaagatggtcttttcttcagtgtatgttcttggcacctttgttaaaaatgagtttactttaggtctgtggagttgtgtctgggctctattctgttccattggtctatgtgtctgtttttatgccattagcatgcatttttggttagtatagctctgtagtataatttgaagtcaggtaatgggattcctagttttgtaaacaaggatcatttgattcttccttttcaatctggatgccctttgtttctttctttgatctagctaggacttgtagtaatatgttaaacaacagtagtgaaagtgggcatccttgttacagatcttagagaaaagtcttgtagtttttccccattcagtatgaaattagctgtgggtttctcatatgtggcttttactgtgttaaggtatgctgcttctatacccagttttgagagtttttatcatgaaggcatgttgaatttttatcaaatgctttttcagcatctattgaaatgatatggtttttgtccttcattctgttcatacgatctatcacattgattttttgcatatggtgacccatcttggcatccctaggacaaataccacttggttataacgaatgacctttttaatgttgtgttgaatttggtttgctagtattttgttgaggatttttgtatcagtatttgtcagagataatagcctgcagttttgttttctggatatctgtctggttttcgtgtcaggctaatattggcctcacagaatgagttcagaagtacttcctcctcctctttttcacaatagtttgagtattaggtgtttcaatgtttggtaacattcagcagtgaagccatcaggtctcgggcttttcttcactgggagactttttacatctttgatctcattacttgttgttggtctgttcgggttttgcatgtcttcatgacacaatctaattttgagtttggtttgctattctagttctttaagatgtattgtttctcttttttttttttttttgatacaagtgcttattgctgtaaactttgctagtactgatttatctgtagcccacaagttttagtatgctgtgtttacagttttgtttcaagaaattttataacttccttatgaatttcttcattgacccactgatcattcaagagaatatagattaattcccttgtgttttgtataattttcaaaattcctcattactgatttctcagttcattcaactgtggtcagataagatactttatatttcaattttttgaatttaaggcttgttttgtggcctaacatatggcccatccttgagaatcctccatgtggtgatgagaggaatgtacactctgcagctgttggttgaaatgttctgtaaatatttattaggtacatttagtctgtagtacagattaagttcaatgtttcctagttgactttttgcctgatgacgtccaaggctgaaagtggggtattgaggtttccagctctctttaggtctaataatgttgctttatatatctgggtgctccagtgttcggtacgtatatatttacaattggtatatcttattgctgaaatgattcctttattatatgttgatctttgtctcttcttacagtttgtcttgaaatatattttgtttgatgtaagaatagctactcctgttcttttttggttgctatcgacatggaatatctttttacatcccttaattttaagtctggctttgtaggtgaagcgtgtttcttgtaggcaacagattgagtcttggtgtttgttgttgttgttgttgtttgtttttttttttttttttctgtcactgtgttttgattggagagtttatttcatttatgttcagttttattattaagaacttattcctaccattttgttttctggttgttttgtggctttctcttccatcctgtcttcctttttagtgaaggcgatttttctctagtggcatgcttttatttcttgctttttaaattttgtgaatcttagtatatcttcttatttgaggctaccatgaggtttacaaacactataacccattatttcaaacagacaacactggttgcataaacaagaaagcaaagagaaaactaattaaaaactcaaacttcgtctcttttaatctttttgttgtttgtttatatctcattatactgtctatgtcttaaagttattagagttatttgttaactgaaagcttcctttttttactcttcttattcaagatatgagtagttcatacatcacaattacagtattacaatagtttgtgtttgtctgtacttactgagttttgtgccttcagatggtttttctggctagttaaggtcctcttctttccagttgataaattctctttagcatttcttgtagaacaggtctggtgttgatgaaatcccacagcttctgtcttggaaggtctttatctttcttgttggaaggagattttcactggatgcactatcctagcataaagggtcttttccttcagcactttaaatatggcatgacatgtcttagcctgtaagttttctgctgagaagcctgttactagttgttgttaagctttttggaatgtatcttttctcttgctgcttttaggatcctgtctttatccttgacttttgatgcttgccatctaggagccaaggcctgaagttgcatctttatgaatctatctggtgctctcttctattgtggcagagctggcacccaagccacaatacaaagtttgtcccattcttcctttcccatttcataagcagaggaatttttccccatggctaccactgcctcaggctcatggtgagtactgcctggctaccactgatgttcactcaaggcccaagagctttttagttaactaggagtaaacgctgcgaggcctgggtctctccgttctgtgcagtgggttctcctcaggccccaggtgagtccagaaatgccatccaggagccaaggcctgcaatcagagaacccaggagcttgcttgatggtctacctgactgtggttgagctagtacccaagctgcaagacaaagtccactctattgcctctcctttccaaaagcacaaggagtatatccccatggccaccacacttgggaatgcattgggccacacccaaagacagcatggctctgagtcttacccaagacttggtgaatactgcctggctactactgctgcttattcaggacccagggactctttagtcagcaggtgacgaattctaccaggactggattcttctcttcaaggtagcaagttcccttctggccctgggtgtatttaagaatgtcactcaggagccagggcctggaatggggggtctcaggactctgcctgatgccttatcctactgtggttgagcttgtgtccaagttgcaagacaatgtcatctttactgtccctatcctctcctcaagtggaagaagcagtctctctcaaagctgtcagctgcactgttaggggttagaggatggggtggtacaagcactggtgtcttactgggttgtgtgcccaccaagtcccctgacttcgagtccagcacgacaccaagacttgcccaggaattgcagtttttgtagcctagactccctttgaagtttatttaggaccccaaagtgcttgagctcacactggtgagactagctggaactcagcttctaactgctgagatgggtgatacctccctggatagggctggtctaaatgtgccctctatgtgcgcttgatgaattctgccctgtgttgcttcccactgtgacagggcagcactgggttccaatgcaacgtttcacaatcctgcgccctccctcctgcaagcacacagatcgtctacatgagacatggcctctgccaggggatgggggaggggtggtgttggcaattcgtaactgtctttcctaccatcttcagtgcctctttccttgatatgatattaaaatcaagtactgtgattgctcacttgatttttggtttttatgtaggtgcttgcttgtgtggctatctgttcagtttggtgtttctatagcagcggtagcgggaaagatgattgctggaaggttccatgtatttgaccgtcttgttctgcctccctcctagtaaagctattctttaaaaattctagcatgttagggttttgtgttatgttctttttcccatggaatttgaaaatggatctatttgagtagaatttcaaaagaataactcataatttttgtctaagtatatatgtggctggattcacaaagctgggcacacagggactggttggttgccgcaggtatcattgttccctgcttgaagtacccgggcatttacaggtcttgtcattgacatggctacctggttgtaggaatagtctaaatcctatgtttttaatcgtggaagtttaagggatgtcttttgcctggaaaccagggattttcttgacttgtgtgaaattcaaagtttatatgtgatccaaggagtgtatgtaaagagcacagtcacccaaaggctaatgttagacccatcacctgacgttttttggaaagtatttgttgatcccaaggcttgtgagagctcccactgttacatgttctttagtcctttctaatgcttctatgtaatagtaccttttaggaatattttctttgctggactctaagttctatagggtctgggcctatgtctgatgtactagcatatgattcagtacctagctcaggtttattcatgctcaatatgtctttgactgattaaattagggatttccagataggtgatgaaaaagctgggaattacctcatgaggggattgtagggttttaagcagaaaacgatttggtgaagtatgacaaaagaaagacaaatgttagaaagataatcaaatagtaggttataaaaggacaaggaagcaacataagattgaaagaacaagaacccagaattagacagatctgagccataattttggctttaccccattctagtttcatgacaaagagccacatactcatcttacatgagatacttagaggttaagtatgttactgctaatctcagaaatgccacaacggttatgaaatccactcatttaatagtgtgtctcatgagtatttacgttaaaaatgttaaatattatttattgactattatttttccttagtataattcctgagcaaagaactgagtaaaatagatgaaaagctctcacagggttgtttcaaacctaattaaacccgatattcctaaaatttgagttatccagtatgagaataggtcatagcatgcaaaatgtgtatgcacagcaagcatgttttgagtgataaggatgtcgaaccactctgactggtatattccaagaatggttaaactttatgtacccacccaggtagattgtggtcttttgcttctttgtgtatttacttttccctttacccgtaactgccttgatcatgcctgtattttttctctccttcatagaatctatattcatttcagtgaattaattagatcatttagggtataaatctcttactcttgctattcaaactaattcaaatagacttgacctatgataaaatttttaaattttttttgtcatttgaactttccttttttcatccgtcatcttcggcagattaattatgcacactaattatccttaaatatagctttagttttcaaaaggggataatcgtgaaaatgtatcattggaagtgtgctttgttaaattgagtgtattttttttaatttcagtttgggaagcagcatattgagaacctcttcagtgacctacaggatgggaggcgcctcctagacctcctcgaaggcctgacagggcaaaaactggtatgtgacttatttttaagaaagttaactttaaacttagtagaatttcagaccagaaactgacaacatagttttatgacatctagtagaatgactaggtactgattgaaacagcaatacctattccttagtaaagcaacctcgtatgattttcatttggcatactctaccgcctgcagaaaaagtaaaaatttcagtaatacaatttatattaatagatattattcagttttactacttggtatctatcttatcaaatatcttaatgaaggcttttatacataatgacttgagaaattatctttgtacttttgtgtatttttgaagttattttacaaggaacctgtatgagtttatacatgtgggatagcaaaataaggtacaggcattatagtgtaatacgtgatagcatatgtgatgaaaatatcacttcctcttgaactattatcttgtctaacttcagagcattcctgtgaagatacatgattgatatacatgattacagatcagtgaagtcatgttgatcaaggtcttacactggggggggaaagaactcaaattgaaatcccctgactgaaataatcgtcttagattgctattctaaaaagtagagtttaagcccccagtctatagtcataaataactgttctacctatcaaattctgctaaatcatagccttcgtctcttatctttgcccttcattacaactccccagcacatgcacatacacacacagacacacacagattttgtcatattatacaaactgaagctgtcgttcaaagtcagttagcaaaaatcctatctaccccagcctgcctcctgtaacacttaacgctaagccactcttttctcggtatatattgtcagatatctctgggtttttgcctgtattattttacttgcctgtatttctttttgtacttctgtctaccccaactgtctgccagaaaccttgatttcacctcagtaaagcttttcccaaattacctttgctaatttttccctcccaaattccacagaaggcccatttttgtcttgtttttagtgtatgtatgactgacatccctcctcaattaaattctgaagtcctatacagaagagacatacctatgctttcattttttatcttcagctatgtgagattaatactaaaacggatccatttttttcaagaagtctgaacttgtactaatagaagaacaacttgatgacatattgaaataataactttagtcaagggggaaaatcagatttaataccttatagctgaactgtttgctgggcgccaatttgaggtcatcatgtaaacttggtcttaatttcactagttagagatagatttgtgtgtaattcatctcctatgactgtgaacaatttacatatatatggatacgtagcatatgtacagaaatcagtgtgtctgtgtatctcgtttctcctgtattctgaagtcagtcctactttgttaccgaatacagaagtcccagtgtcttccaaatgttcgtgaaaaatctttcaaagattatggcttactcatcttgtcctggccctctgttaggaggctgttgtctcttcacttccaggtatctgcgtgatcacttctcctgtgttgcaatcctctggtcatttccctgactgagtcaatccatctatcacccaaagcaatttagtcagggttaacaaatttcatacataatgtttaagataatgaatttcagatcctttcgtaattcataagcatgatttgggtgtttatactcagatatgagataagcctttctctaaacttatgatgttggcacactacccatttgatataaagaaaaaaccactaatttcggcaaaattaaaaaatccacatgatttgcatttatgcatatacatacatagacgctaagacaaaatgaacctaattagtaatagcattaaagaaaaaaatatcaaacaaaatatccatgagattggccagtataaggtaagctagtggtagggaaaaatcaccaaacatttacacatggcagtgtagattacataatttcagatactgctactaacagaatccattcaccattgtttgtcctaatcacagatctgtcagccctggtctgaggattttgcctttctcataaagcagaatcacctctaacaaatgctcccgatcccagaactccaattcgctatgccttgtcttgaattctaatagtttctgtagagatatatcttctactcctaatgggaggcatgtatactatagaacagaaattttagtattctactcagaagcatctgcatttggattattggctcaggacatccccagggttaaaaggaaggtacttgccttacaatcataaaataagaaatactccccaaggagactctaataggggcagattttaagttcccacttcaggatcagaaactgcagctttttaaaagagtagactatgtttggttctaatacatatgcacatgtgtacatttaatgtttgaatatgatacaaaggaaaattttgctaaatcttgtgactatataattacataattgaaaggaaatatgtggctttggtctaactactaggcagagaactgatttgagtaattattttcaaaactttaaagtcctataattaccattaaacttgtatactgtcaatctatatatacacaagaagattggttatttgctgtttttctttcatgtattttttttttattttgatggaatcttactctgtcgcccaggctggagtcagcgacatgatcttggctcactgcaacctctgcctcctgggttcaagcaattttcctgcctcggcctcccaagtagctgagactacaggcatgttccatcatgcctggctaagttttgtatttttagtagacatggggtttcaccatgttggccaggctggtcttgagctcctgatctcaatgagccacctgcctcagcctccccaaatgtctggctgttgcttttttttttttttttttttttttaaatctaaagtcttatttttttcctctttttggtggaaagtgggagaaatatcagaatgtaaaccaacatcattctgacattcttggaggaaaatctaagaggtaaaaatggagattctggttcataaggttagccttaatgttttgtgaaatcaaaggaacaagatgtcaatactgtgttataaaggatatcaggcaagttaccttggagagtaagatggctttagcttaatttgggttgttcagcaggcagtgcaaatgataaggagttctagggtgaggaactacttgagaaagaccaggagctttgctggaaagtataggagttaaatgcaagacacagaaatatagatatttgtttggtgcatgcacaaggtagttagagaagaaggaaataaatttgcaagactggggctctacagacacagacaaaagtttgggtcctggctccaccaattattagttatatggtaatctatatattagatattttaacctgaggttcacttctgtacaatagggatgaaactaactgccttgcaaggcggggattaaaggtagtgcattcaaagtacttggcacatactacgaagtcaataatatttatgttggaccaactatgtgacaagcaccaatcttagtgctttatgcatatcgacacactgaattctgccagaaaccatatgtacaatggtttgagcaatatgaacaataagtagtgccctggacaaggtctggatcctgtgagacagcatgcttcatgtttgagtgagggctttgacctcaaatgcagagaagaaagtatgtcgaattctcttgtaaatcagagcagttgttattgagagcacatgttgtaacttgtgtatgcctcttgctaatattttcattaagtccatttttaacagatgagaaaactggtatacagggagattaaattttttatgtaggccagacagcacaaaaacagcagagctgacaattgaacccaggcagtcagctttgtagctcttgcccttaactgttacctataatcacccaaatgtttaggtgagaactttgcaagtggtttgcattggcagtgggcttacttcaggaacgtcattgttgatggtatgaaggaaggatgaaaaaaatggtgagtgagtggagaagggaaagaggttagatttctctgggcaatagctaataagggcttgtagtaaggtaaaagaaatgaaaatgagagtaaataaaacaggttatcataatggtagaatttctaaaactctacaacttaataaatgagttaatttgtatattacaatgaactatgcagatgttggtttaaaaattacaggataagatacaacttttgggattgagaataaaattagggaaccaaagtgattgaggtttagagcttcagtgacaaggacaattaaggtaatcttcacagaaaaggtttcctttaaccctatttggcattatataattttgctagagtcaaatctcctttagatttttctaaaaagtttgggaattgtttttctatcttactagaaaatgtttttatgcatgctgatgtttctgtcattggtggtcatgcagtaatccccaactgggctatagaatgaagaaacaatcataccaaaataggctttgtaaagaaaaagtgttgccattcttagagtggttggtttatgctaaaaacgtaccaggccaaggacaattagcgcaaagtatttagattcattatattaatgcctcacaggctctgttcgtttacaatattcaagcttaatagtgaaattataaatggtttcatttctagtagattgtcggtctctctgctggtcagtgaacactcttttgttttgttctcagccaaaagaaaaaggatccacaagagttcatgccctgaacaatgtcaacaaggcactgcgggttttgcagaacaataatgtaagtagtaccctggacaaggtctggatgctgtgacacagcatgcttcatgtttgagtgagggctttggccccaaatgcagagaaagtatttcaaattctcttgtaaatcagaccagttcttactgagagcacatgttgtaattcgtgtatgcctgattgtggctaatataattcaggaagcaaatgcatgctgccacagagggaagggaaaagacatagacctgacctgataggctgctccctgttttcagattttacttcatgaagctgtgtttggtggacaaagtcctgcagtcaactcggtttcttttcttactttgcttttctttttcttttttcttttcttttcttttcttttctttttttttttttttgagatggagtctcgctcttctgtcccaggctggagtgcagtggcgtgatctcggctcactgcaaactctgccttccaggtttaagctattctcctgtctcagcctcccgagtagctgggattacaggcacatgccactatggccagctaatttttgtatttttagtagagacagggtttcaccatgttggccaaggctagtctcgaactcctgacctcaggtgatccacctgcctcagcctcccgaagtgctgagattacaggcgtgagccaccgtgcccggtgaactctgtttcttacggcagtgttttgtgcaacaaacggatttttctataccaaatatttatgtactaaatgtgttcaaacctgataatgatgtttgtttaaatcaagccaacacttattaaacgctgtctccaagcatataaattatacagaaacatcactatttttacttggggtatgaatggcagatttgtttttttggtttagatttaactggattaaaatacgtgtgttgcattagaagaagtaaacagtcacagctaaaccaagtaggcaggtcagaggaattctaatctcctctgaaccacttggtgactcttcccctgtgtcatggcattggaggcagccttcctttcttattaacatcctaaaatctgtctaatcgaccaatacatttcaccaggcacttagtagctccctaattacattacctctctctttcaaagataaactcaagtacattgagtacgttgatcacttactcttaaaataaccataagcagggatagattaataataacatgtactcccccaaatgttgctcagcttatctggcagggagatgacattacataagatatggaaatggaaactgtgcagcaattaattggctgattttatgaattcagggtcattgtcacctttaacctatgaaagttattttacagagatgtttgtcttaggaagaaattaactagatttttcactccgcagccagaataatctatgagctgattttcttgtttattagtccgatggactctttggaaatatcagtgtcattgacattatgagaattgttaacaatattaaagttacacaaagaaaatgtctttgaaatatcaaaatatcatattctgtttcaaaatgtagcagtgaagaaaagagcggaacacagaattattagatttaatttatttgtagcttgactgtccccagcaagaaaatgtcatttaaaaaaacaaactttgggatatcctgtaaaactcaatcctgcataaagaaaatgcggtacaggtcgggcgcggtgctcatgcctgtaatcccagcactgtgggaggccgaggctggcagatcaccagaggtcaggagttcgagaccagcctggccaccatggcgaaaccccgtctctactaaaaaatacaaaaattagctgagtatgctggtgcatgcctgtaatcccagctactcgggaggctgaggtaggagaattgcttgaacccagaggctgaggttgcagtgagtggagatcgtgccactgcactccagcctgggaggcagagcgagattccatatcaaaaaaaaaaataataataatttggtacatatacagcatgaaatacaatactatgcagccacagaaaagaattagatcatgtcctttgcagcaacatggatgagtctggaggtcattatcctaagtaaactaacacagaaacagaaaaccgaataacacatattctcaataagtacgagctaaacactgaatgcacacgaacacaagggaacaaagagccagcagcagctagtgctggggaactttgagactcctacgtgataaatcatgaaagggtgtatggggggggtcttacttgcaagtatgttttgggaggttttttgggcacacatgctctggttgtacatgctagcacacataccacatctcattggcatctaaaatctccacccaggggtgtgtgggtttttttgtttgtttgtttgtttacactattacaatgagcaaaagaatagggcaagtttttggaggagtgtgtgcatgcttgtcagtggggaaaatccctagcgtggttatctctggcgagggcctgagaagtcccctttggggctagaggagcccaaccacaaggctagacataatcagtgtggacagtgtgtgtattcattgtccgtttcgctgattgtcaacaggcagcactgactcagtgaaacagcatcttcaggacttcttttctcaatggggctcccttgcctgctcatttctggctatctgcctactccaagggaaccagaaaaatcctggcaataaaacatatagaaggaaatttatatgactttgggataggcaagtatttatgatacctgaatccaaagcatgtttcaaaaagagaaaagttaacttggacttcatcaaaattgagttattgctatattctggatatgagccctttgttttgagttgcaaatgtattttccttttctgtggattacctttttactcacttcaatggttaatattaataaaaacaagttctccacttggatatagtttattctttaaaactttatatttttatgacctgttgaagaaatactggcctacccaaagccattatgatactatattaggttattatctatagaaccattatcgttttaccattttgtttttggatctgttttacctgaaattgattattgcatatggtgtgaggaataggttaagactcagtatttattttatttgaagtctaattaacacaccatttattaaaaataatgcttcctcattgcttcacagtactaagtgtgtcattaaaaatttgtccgtacatatgtgggtctgtttttgcacttcaattctcttgcattgttctctctctctctacacacacaaatatcatgtaatgtggagtaatgtagttttataatacagcctagtatctggtgaactaggttctcccactttgttcgagattttattggttattggccctttctatttttgtatttgttttgtaatcttttccatttacatgtacattcattttaagtatgattaacattgagttaaatctatagagaataactgacacatttacatatggagtatcccagtcttctgtttttcttgattttttttttaaattttaggttttctagaatgagaaactgaaattgaacaggaacacaaaaggtgttcacaaattcaagaatcatatttaagaaatgtttaacctcagcagtaacttgaggaaatttaaattagagctgtaatgagataccagtacaaaattaccaaaatgactgaactagactactaatgccaaatgttgatgaggacatggatcaactggaaatctcacaattaacttctggaaatataattcaggcaactaattaaagagttgggcatgatctactaaatgtgaaaatgcacatttcttaccacccagcaattctattgtagacatacaagttacagaaatacatttcccagtttgccaaaaacacatatatatgtgagaatgttcatagcagtttcatttgtgatagcccaaactggaagtgactatgatacattctcatgatgggatattacagagcaatgaaaatgaccaaatgatagctacacacaatatacaagatgaagtcgttaaaatgtatttgagtgaaataaatcagacaaattatacctactatgatttctttcaattaaatttcaaaaacgggcaaaatgtttccatgggtttaaaattgaagagagtggttaacttttggaaggagtaagtcagtaaaacgcataagagaatcttctgcggtgctcactgttccatgttttgacctgatagctgttacacatgtgtatttactgtaagaaaacgcatcaagttgtacacttatgtatatttttctatatgcatattccacttcaattaaaagaggaacttatgaagggaacttaaaacctccgaaactccacgggccatatatagaaatctgatcatagaccccatgttttctaatgaaattattaaatgaatataagtgaatataaaattagaatatgatgtcatatgaatctcttcagggaaggccacatttcttacagaaaatatagaacctcctaatgttttagtagggaaaaggccccaaaataatggcttaaatttgagaaggagttgttcaaaagcagatattaacaatgctttcatctgagctagagctttaatggggagctgcataagatgctggcctatgcgttagaggacaaaacctcaagacattctcatgcagaaaccaaacttggaacaaaggaacctttaccttagcctgtggctgaacaataacacatggattttcaaaagtaaatctaggctgggcgcggtggctcatgcctgtaataccagcactttgggtggtccaggcgggtggatcatgatgtcaagaaattgagaccatcctggccaacatggtgaaaccccatctctactaaaaacacaaaaattagctgagcgtggtggtgtgcatctgtagtcccagctactcatgaggctgaggcaggagaatcacgtgaacctgggagcagaggttgcagtgagtggagatcgtgccactgcactccagcctggccacagagtgaaaaaaaaaaaatgcattatcttataattctccattttgtcataagtataaacaaaaatggaaaacatccataagtacaactttagtttgcttattaggaagaataaatcaaaatgctcaagcaggattttttttctaaagttgagcttgggtgtgttctatatcaataagcctgtgcaggatataaataatcacattgaagaagtcctatccaaatttccttttaaaattcacaggtatataagttgattgattggtgtcagagcaaacacaaccctttgtgtgtcagagattacagccacatggtaggcaatatgaagcatatatacttaggaacagttaagtgaataaaaaagagatacatagaataagaggtctgagaagaccttttggttcagttcctatatgagcagagacctggagaaagggagtgagccttggaattgtctataggaaggtgggttaggcacggtaataaagaccttaaggtgaaaaagcatttggaatgaggcctcagcaagtggagtagagtgagtttagagataaaggaaacatagcagagataggggagcagagaggtagtaaggtgggggtgagaagaagaaagcatggtgagccattgttggcatttggactcaggtctaaatgagatgacaatgactaaaaaaacactactagaaattaaatgggtcataagtcaggttattttaaaaatcagtaatagttccaagtctttgctattgtgaatagtgccacaatgaacagatgtgtgcatgtgtcttcatagtagaatgatttataatcctttggatatatacccagtaacaggattgctgggtcaaatggtatttctagttccagatccttgaggaatcaccacactgtcttccacaatggttgaactaatttacattcccaccaacagtgtaaaagcattcctatttctccatattctctccagcatcttttgctgactttttaatgattgccattctaactgttgttaaatggtatctcattgtggttttgatttgcatttttctaatgacaagtgataagcattttttcgtatgtatgttggccaaatgtccatcagtgatagactggattaagaaaatgtggtacatatacaccatggaatactatgcagccataaaaaaagaatgagttcatgtcctttgcagggacatggatgaagctggaaaccatcattctcagcaaactaacacaagaacagaaaaccaaacaccgcatgttctgactcataagtggtagctgaacaatgagaacatatggacattaggaggggaacgtcacacaccatggcctgtcagagggtggggggctaggggagggatagaattaggagaaatacctaatgtaggtgacgggtctatgggtacagcaaaccactatcgcaggtgtataactatgtaacaaacctgcacatgtaccccagaacttaaagaataataaaaaatataaaacaggaaaaatcagacaaaatgaaaaatcagtgatagaatactaacaaacttagagtgtcattttattcaagaaagttacagtcaataacgaaaacgtatcgcacagtagaaatgctgctaaatccatgaagaaaaattgatggaaatatatttttagagccattaattcaccactgtcaagtttatgacatatttaacagcaaaagattgagagtacaaataactgtaggtttaatagtgattttctgtatctcaacactaaagcatagtagatacttctataaaatatgagcattatcaataaatctccctatgaagttggatgtgcaagaagagcaatagtttaaaaatttcagttacattaactaaattcaagtctgaactctcaacaaggcattcagaaaatcgtatgtctgtcattattgggaatgctctcccctgagcctatggaatggccagagctcagtagatccacatggtgtctttcatagggcaaaagcattttcattttcagttcattgaggcaaccaagtgatacattcactatacaattttaaggtatcttgtgaagtcaagtgtattaactgtcctgatattaaacacgtggcatacagaaaaagttgaagagagtgtaatcaggggaatatttatagaaacgtggggaggattaaaggaagaaactatggtgaagaatgcagggattcacatgagttaataacctttactacatctaaacctaagcagtcaaggggagagggctattaatttgataaaatccctcatgttgggagagcgccactggacacaactgtgaactgagcccctaggtatctaaagaatgctgttagtttcaaatcattgcctggtgaagttgagagaagtgataccttagtctctccatagaatcctccagtgttttgccagtgccgctccttagtttagtctaaccagaagtccaaggttaagagattccaggtgatgtagtcatcacatacaaagaagaggtgaagaagtttggtgggttagtgaagtaggagtggaaaacggtataatcggcattccaggtatctagttctgttttgtttctgtgcgaaatgaggacttgagaatctgcatgccgagaactctgatgttggctagggcccagtcttgttggatgcatcaggaagccagtcacctttgaggccataccacttctatttgatgacagagagtagacgtggtttctggctaatttggggactaaggactccttcctattcttctggagacaaccagagccagaaaagaaagacacgctgagagtcacttcggatatctgctcttcgtcgtaaacttgttaaaggcttaggaaaatagtaaaaaaaatttcctgccacatacacaaattataaacgggcaatatatttgaatgcagtgaaaatgtcattaaatacacacaaactttcaaaattcatgttatttaataacagtagaaactaataatatacttataaattaagtttgattaaggtttgttaaaccaagagtataaaactacatttgtgaaggaaaaagcattccatatgaaaacccatgagaaatggctcaggctgtactgagagtttgaatttttgtctttgattttgatcttcattaaaaagataaattgaatcaagctttcaaataaaaatgttacaaaaatgctttaaggaaagcaggaactaaagataaagaaatagaagaaacactagataaaatatacagctagttccttataatatgaaatagattaatatcttatgaatgtgatccagacaaggagggagaaaaacaaatgtatgcagtttaaaaatggaagggaaatattaagtatgagatatagaaaccaaaaacgggttttacacagaaatacatatatgtttattataaaaaatgaagttgaggccgagcgtggtggctcacacctgtaatcccagcactttgggaggctggggcgggcagatcacctgaggtcaggagttcgagaccatcctggccaacatggcaaaaccccgtctctactaaaaaaaaaaaaattagacgggtgtggtggctggcgcctgtaattccagctactggggaggctgaggcatgagaatcacttgaacccatgaggcggaggttgcactgagaggtgatcataccactgcactctagtctgggggatcgagcaagacttgtctccaaaaaaaaaaatttttttttgaataccagtgataagtttgtccacacaccaagaaattgataattgctaatagaaaatcatatgaacagcctcctaattctataaacctatgaaaagaaaccctggtttaaaaaaatcactcaaaatttagccctctgatttttaaaggaatattagaagtgtcttttcaaaatgatactttttggtaatttctggatcattaagtcaaggtcattttgtcttctctcttttccttagggtctcctccattttagcctgtccctctgccataaatcactagttctagcatattctgtagttctaaactagctcctcagtttaaccctgttcctcagtttctttcctttccctgtcctggcgtttaacctgttatcctcacttgaatgccactcagcttatatctgtagagctcagacactacgtctgtgttccaatttgcattctttgtggtggctgttttagcatgaagttatccctgctgtcaataatgtattttggaaagccacttattgagaagaaagtacttctaagtgcagtgataactttattgcggtatttgctgagagcaaagctcatttgtaatagttggttgtgattttaaaaagcgaacaaaatacaaaatcctgagaaatgggagactatgctactaagtggttattcttgtctctacatcagctctaggtaaaaatgtatccacagcttctttttatttacaagtttttgaaggtaaagcaaatcccagctaggatgaaacatctcttatacagccattctattatttctttgccctgtcccacttttgtttgtaagtagtgcctttcattaggcattttaaattcagttctacacttaactctattctctcaaagatatttaatgggtaatttaaactttccttggatataactaagttctaatcagtgagtattctctattagatatttgcacttttaataattttgtgtctagtttaatgattaattttttgtctggtaaaggaacttagaaattacaaatttgatagagatttaactgtggtgctttaaactaccccccgctccccaagatgtattatgatctgtcttcctttctccaagcttgtgtcctcgtcttccctcttatgatttccttgcttacattttatgaattccgatcccttttataaagattcatacaaaaggtatagtgttgaaatataccctaggaacattaccaagacttcgctgacttaatataatttaatattaactgacacagttgtagatctaataattatgttcattgtaccagctcatcaattgtctatcacaaggtggtaagtttttaccaagtaacttcaaatctacaatgtgggatactacaaagcaaatagtcattgctatacattaaatcacaaatccaaggtgagtatttaaaaagcctagggtggaaattcagatgacagctatgttcaaatattcacttaaccccatcattgaaaatagtcactgaattagattgaatggttgtcagatgtcactgatctgaaaaatgatatactgttcacatgctggcatataatgttagataaagaggattctaaaatgttctttaaaactagtattttatgtgtcctttaagtattcagaaacttaaatagccatataatacatattttggagcatgtcagaatatatttgactataaactacttctatttattactcataaaatctagtatttaagtacaaattccaaatttaatttgttagacaagtatttcttacacaaaattgtcagtccacacaataggcctgtaaaatatttgcactttatatgtattaattctcaagtttgcagaagaggtagatcttgttaactctgtaacttatcaactatagggtctttgccaaatgattccgtgactttgactcactttatcatctgcgaaatgcattaatagtaaatgttcacttctttcaaaatacttgttatggaagatacaaatatacaaacataatctcgtattcattaaactcacattcagttgcaaggtaatataactactcttaaattgcagcatgttctcatttaaaataattttctgggtgagttgtttattcttcccatcccccttagtatacctcttgctttaagggaaattagtattgacacatttcttgtatattcaacttcaaattgagatagccagttacctattatgttcacatatggaggtctgctgggataataattatataactataaatagtactgtttaaaaatatttcttataatgtcactcaagtatcttttaagatttttattgtagctattgcttttttttttttttttttacttgaaattagtatacgtgacttgagcttaaaaagttggggctatatgggttgatttttgtcgttaaagttacatcctatattgccagataaaagatacgtaattacaaaaattcaaattaaataatatactgaaagtatatatatctttcatactaaattgtgaaagtattgaggacagtgtccatttactcaggcaatgccctctaatatatattctatataaggaattttgttgagtttagttaaaagagctactttcccaaaaagtttagtttgcattttattaatacgttcaaccagattacctgtatcaaaacttctattttgataaatttgttttaatgtctttcatgccattaaatgttcatattttcttaggattatgagacacttgtattaactgcctcaattctttattgtcaaagaggcagtatataaacaaatgaaaacatgactccattaaaaataattctcctgcaatgtatcagagtgatcataaacatatctgaaatatagaggaaatttaacatttcacttgtccataagcaatttgttgaaagtctattttttaaatttattcttaacattctatgcgtggcatatagtgagtggtcaaaaatagttaaagaatgactaaatatgtaaaacttaatcattgaaggtagagatagtatctttgtagtgagtacccagaattaaatcttgtaatatagttgaggtcaaaatgtgcttcaaaaattatctaatgtaaatttctatatctgaatcaaaaataattcttgaaatacggagataaggaagggaataaaaagctgtcattggaaatccaggtccacagtggcaatatggcccaccgtttaggttgtatatatcgacgtatttatgatttaataagaaaaagattcaatacatgcatctctcaatggaagaaaataggtatgatttatgcccataagtcttgaaattttaaacagtgtaaatcttaaatgtggtgtaaaagcacatgctgcagggcaatgaaactactttgcctttcctgtattttttatctttttaaaatgcattatatttagaaggattgtatgaatacttgagaagtttctcttgaatatggagaagtctttagcttggctacatgatggcagacatcttataaaagacatttaacatgtttaaaaagcaaattctgtttatctagaatgttggaaggaacttctcggtttatatatattttatgagaacgaaatgaaatgaaaagaaatgaaagaaccaaatagatggtggaagtacatgcttgaggtttcagtgtcaggaaggatatttacataataattttcaatgcatgggatttcccttttagttattgtttaagattctgtttaaggaaatcaactcaaacttttaaggatatttcagggttcctttcagaatctttttgtgaaattattttataatagtttgtaccatttcatatctagttaaaatcaccaagactgagtgaaaaggtagcttacccttatccccctcccttagctaattttaaaaatgcttgtattttacactgcatatgagggaacaaaagtgactccttcttaggacaaatatcaaactctgaaatgatctgggagaaccaattcctttgaaacaaatgtgagaaacgacctgctttagtctaatttcaattggctgaatgacgcaggacgtgttttcattagagcctgtagctctgaaatgtccttgtcactggttgtctaaaaaggcaagaagaggcagacaccatatattataaagatgatggttcccctgtgaatgagatataactttctgcaacttccaagttaaaaccgcaaatgcttaaatgatacacaaaactctaaacatccatctctctctgcatctaacaaaaataaaattgtatgaaaaaattcattaaagctttgtcagaactttgtcacctgtctttttctctctctcatacacaaaccacacatcacacacacacacacacacacacacacacacacacacacacacacacacgtaaatatcttacaggaatgtaactcttagttttattcatcattttcccttctctctctccttctgctctgccctaagaacttccattttcattatttgacttggttattgaaattattttcaagttacatgcccctcattctgacgtcttatttactattttctgtttgatgaaccctagtctgctattcttctttctgtaaagcaaatcaaaaataacactaacttgttcctgtcaataatctttcagaaaaccatcatatttcaggtttactttcatcttaagtttttcttaagtattcttaaatcttgaatatatcaatataataagtataaatccttttactgtaaaccatcatgggatatctaatcttagcttgaataaaatattgacgatggtagaaattacatccatgttcctgaaggaaagtgggataaaagaaaacagcgaggttttttgcctgtctcgaacaagcaaatgacgagaattgttcctcatagcccagtcatttaggaggtagagtacctggaagtaaatgctccctgaaatgattatatattaatcttagaattactaaatatatattgttatacaaaattatgtattgtaagtactagtctggcgatagaagagggacccccttaagttcttgtcctatgcctttaaaatagacagcaggagactactccatactaaagaataatttaatgtattaggttttctatgtgcaattcttacagactgcttattgtaacttgaggtgtttctaaagagttcacattttaatattctactggagtcacaataagtttccattatgtcaaagcaaaccatggaggttttctatcctccaaaattacatttgaataaagcaacttccgaagataacagtgtaaaactctgagacagcatcccatgttactttatgagtaaaatcttaggcctgttgacaggaactacaaaagccaattgtgctgcgtagtttaacttatttctgcaaaaactcaaggcatgttattacattttcacacagaatatcaattttcacacctattttggtatcagatgttttcattgtgcaaaacaggaaagcagaactttgggtaaccacagtgaccctactatttaatttccaaccatagagtgcttgtcacaacactgatacacacagtaggctcgtacattaacatacatgtcatattaatgttttctgttttgcttagtagacagatgtaatcattcacttcacacagattttaaaaggttttaatatttttaccattcagttatttagcaattagactgataattcttgaaagacataattctggaatgtgtattagaaaaaaaaacataaaagagaagttactgtatggcagggtgatgattatttaagaggaaatagtactgaattcagaaaaatgttatgacttacagctaatagtaagaaatacagcattataagagcaacaagcttatgagaattcatggccaaaacagaccagaccgtcaatgtgaggcattgaagagtaatataaatgccatgaacaataccctttcaggcatgacaaatacctccctcctctagagtcttcatggttatcaattagcatttcttacactccttggtagtttgaagaagacatgtacaagagacaaaacacaaccaaaataaataataatccttgtctgtatcatggtgtgaaatgtttattaacttggagagagagcctcttaaagctttttgtggagaattcactagatgtaattaatgaaatatcttctatccagacatagttttaaatcagaccttgtggaagcttcatttatctttgatactctgtttccctcttggtaaaatgcacataaatgtaaaatgttcatgaactcttggtaaaatttatatagctcatacatactctaatgatgtaggcatagtgaaatctgtattcagagagaactgtatagccataagatttttaaaagatggaaataaaagaagtatgcatcttaagaaattgtaaaaatagaaacaaaaataaaaattgtattcaacgtagaaaattgaataagaataatccattcaaaagtgagctcttgaaaagattaacaaaataggtaaacctatcccagtcataacaaagaaaacttagaataaaaactagacgagataaatgagaaaagacgcatgacagcagatacagaagaaatgaagtggaaactaaaagcaattttataacaattttgcaaaattctggaaaacttgattttctcgtacaatacaaatcactaaaattgagataagaataagtggaaaattagactgattacttcagaaaacatttagtaggttattaaaggtgtactgttgaagagtgtagtaggattctttacaaatgaatttaacgtaacccttaaagaataatttatatactttaagctattccaaagcatatgaaaagaaaaaaactccacaattccttttgtgatgtcaggttaacctttgtacttaacagtcaaaaagcaaagatcataaatctgtaagacagttttacttttgaatgaaatacaaaattttgttgaattataagaaatataatcacattttgcaagtggtaagcattctacaaatgttatctcttatttaccaagagctcttaaaattcaagaaggaaaagaaaactaccatatagaaattaatgagcaaaacatattaacagacaattcacacatggaattgtaataggtcagtgatacaaaaatatattcaaatgcacaaggaatcatggaaataaaagttaacaaagtgatgtatttgatcatacaaacaaaactaaaagaatcaaaaacaaaacaaaaatttcctggtgagagaagagcctattcttatacattctggttaaaatatgtaattctaaattgtttctaggaaggcaggtggaaacacctactaaaattacatatatatgtgtatatatgtgtgtgtatgtatatatgtatatagatgtatacatatgtatatatgtgtatagatgtatacatatgtatatatgtgtatagatgtatagatatatatgtgtatatgtgtagatacacatatacttgtatagatatgtctatatctccctgaaatgatgcgtatatatatatgtatagatgtatctactagagcagagtgtgtgtgtgtgtgtgtgtgtatacacacactctgatccagtatatacatcctgtgaattgttataataacagtagaagcatcagtatctgaaaatgtatgcataagatattggccaggtgtggtgactgctggtgggaatgttaatcaattctgccattgtggaaagcagtgtggtgattcctcaaagaagttaaaacagaaataccattcaacccagcaacctcattatttggtatatacccaaaggaatataaattgttctacgataaagacacatgcacatatatgtttattgcagcactattcacagtagcaaagatggggaatcaacataaatgtccatcaacagtagactgattaagaaaatatgctacatatacaccatggaatacaacccagacaaaaataagattgtagcaacatggatgcagctggagccgttatccttagcaaactagtgcatgaacagaaaaccaaatatcacatgttctcacttataagtgggagttaggctgggcgcagtggcttatacctgtaacctagtactttgggaggccgaggcgagcgggatcacctgaggtcgggagttcgagaccagcctgaccaacatggagaaaccccgtctctactaaaaatacaaaattagccaggcgtggtggcgcatgcctgtaatcccagctacttgggaggctgaggcaggagaatcgcttgaaactcgggaggcggaggttgtggtgagccgagatcgtgccactgcactccagtctgggcaacaagagcgaaactccacctcaaaaaaaaaaaaaaaaaggggagttaataacaagaacacatggatataaagtggggaacaacagacactggagcctactcaagagtaaaaggtgggaggagggagaggatcagaaaaactacctatcaggcaccatacttattacctgggcgatgaaataatgtgtacattaaacccccatgacacgcaatttacctatgtaacaaacctgcacatgtactcctgaacctaatataaaagttaaaaaagagtagctgtctgccactgaatacaattctgtccctgaatataatatctccaattcccaatcagttaattaccccctagtgatctgaatgctttctggcatgctttctccacctgatacttttcttcattccaatctattttttctttacagatttaatcaatactgagtacatgaatatatcttatgtcttttgcttatcttttcacaatgttacttcctttttcttaccccttgggcttccgtgagacacagttgcctacctaattgtttttcctgtggatatagataaattttattggaaaaaaaccatgaacatttatttaggtattatctgtggctgctgctgtgtgtgtgtgtgtgtggggggggggtgcgatgtgtgttccaatgacttattttttattgtggtaaaatacaaatgatgtaaaatttaccatataactattttttattttttaattagcaaaaaaaattgtatataccatgtagcatatgattttttaaaatatctagatgttgtggaatgcttcaagctaataaacatatacattaacttatatgtttatcatttggggttgaggacacttaaaatctattctcttagcaattttcaaaatacaatattgttattaaccaaagtcagcatgttgtacagtagatctcttgaatttattcctattaaatgtaatttagtatcatttgaccaacatctgcctaaccctcctcctccaagctctatcccctgctaaccaacattttactctcaattctatgagctcaacattttaaaatttcatatacaagtgacatgatgtaatgtttgtctttctgtgcctggcttatgtcatttgacgtaacgtactctagattcattaatttcattgcaaatgagaggattctctgctttttaagtccgagtagtattccagtgtgtgtgtgtgtaggtctgtatacctgcattttctttattctttcatctactgatggacacttaagttgatttcctatcttcgctattttgagtagcactacaatatacattgaagtgcagttatttctttgacatattgatttgtttcctttggaatatatacccagcagtagaattcctgaattatatggtagttttatttgtaattttttgagaaacctccatactgtttttcatgactacaataatttacatttccaccaacactgtgcaaagattcctttttctccacatctttgccacaacttaccttttgtctttttgataatagccattctgtgtgatgtaatatttcattgtagttttaatttgcatttctctgatgattagtgatgttcaacattatttcatttatgtgctggccgttggtttgtcttcttttgagaaatgtctattcaggttcattgccctagatagggtttgaggtatcattttttctatttttttagtgtataattcagtggctttaagtatatttctgttgttgggtagtcatcaccgctatccatctctagaatgatttcatcatcccaagttgaattcatactgattaaacgattactctccattttcacctcccctagcctttaataacttccattttttctctatgaatttggctattttaggtacctcatataagtagaatcatacaatatttgtcattttatgtcttgcttatttcacttagcatatgtttccaaggttcatttatgttgtagtttgtatcagaatttcattcctttttaaggctgaaaatattccgttgtatgtacataccacattttgtttatccatttatctgtagatggacatttgggtgttctcacattttggctattgtgaataatgttactatgataattggtctaccaatatcttaatctctgtttttaattattttggttataaacatagaggtagaattgctagagcctaatggtagatacttttttattatgtgaccttctgttgtgaactttttgacactgggggggtagtaccttactttcctttatcaggtctgagcccagtacctgaatatagtggaaattggaccttatgagaccttttatgaggacaaggaaatggaggaactatcttcctgcttacacagtgacaagtcttatgacagtggataaggggttactggaatctaagttcctattacttgatctaagtctccccagagtcaggtccatggcaacccaaaacgtatctaccagcagtgcttcccgcagtatgagtgagtatgtttcctaaaaatagcatattctctgcttaactgcttgagtctttagtgctatatcatctgattgtcactatcactagaattaagtttcatgaaagcagaaggtttttacttttacatgctcttattacttcattgcctggcagatagccaaaaggtacttgttgagttagtgaatcaatgaatcaatagataaattcatagtggcttttccttatggaggaatttctctcctctactgccatatgaggaatccccagatgatgatgcagatgatgatgctttcttattcttgaatgatcaatctccccttcgatgtagtaacatcttataaaactaaaatacgatatcatgaccaagatgtcaacattcataaaaccaccaatagtattcagattttcccagctttactcatatttatgtgtatgtgtgcatgcatatgtgtgtatttagttctatgcaacattattacgtgtgtaggtttgtaaatccaccatcagagtcaatatgcagaacagttccaccattacaagggtccctcatattgcccttttataagaacattcagctaccccacatcttactcccattcctgacctctgccaactgctattctgttctctatttctgtaactttgtcttttcaagactctcatagatacggattcatacagtatgctaccctttcagaatgactttttccccacttagcataatgcccatgaaattcatccaatttgctgcatgtatcaatagtttgttcttttcattgatgagtgttattccatggtgtggctgtactatggtttgtttatctacccctgagggcatctgggttcccagtttggggctattacaaataaacgtagtatgaacacttaggtgcaggtttttgtgtacacatgtgttttcatttccttgagataaatgctcaagagcccaattaccagattgtataataagtacatgttcagttttgtgagaaactgccagactgttttccaaagtggctatatcatttgagtttccactagcaggggttgagtcatccagtttctccacaccctcaccagcattttatggcactattttttaattttaaccattatgataaatgtgcagtgatacattattgtggttacaatttgcattcctctattggctaaaaacattgaacatcttttcatatgcttgcttttcagatgcttgtgtttaactttactccaccttaaacatttgaggagtgtgaaggacaggagacacagagatttgccttgattaaggcaaataaaaccctgccagattttcatttccaaacacagtcctagacagagataagagagctggcagtttgctccattgtttattagagacctaacattcattctaaaacagaggcgttttactaaaatgcagtcagccttaattataatggcactccttggagctaggtggaagtactggtgaatttttctgagttgtaattccatactagaaagcatatcttaattttaaacatactttatgacattttatttggagatactccagttgacctctttaatctgcagtaatctattcatgtgctgaaagtaaatatatttggggtgcttgtttgttatggaaagtgattttacacatgcattttgtttaatttttagattattttcaaaaagcttcaatgctaagtctctgaaaatagctaaatgcaattaccttcacgtttttattattattattattgcaactaggcatttggtctcttaccttcaaatgttttacccctttctttaacaggttgatttagtgaatattggaagtactgacatcgtagatggaaatcataaactgactcttggtttgatttggaatataatcctccactggcaggtaagaatcctgatgaatggtttccttttgggtaacattaatcttgttttttaatttttacccttgacgtgtgaaacaaatgtgtatttctaacaataacaaaccctgctccatagtgctgctttttaaattgacactaccatgtcgtctgaaatgttaaggatcatcacggtataaaataggttctggtacatttacaggaatatttttcaaaattttatttcattgagtaagtataaggtaaaaatacaaagtcccaatcataggtgagtaatttttttcacaaatgtatgttctataacttgtctataagttaatttagtatgttttattttaatcactaccaaaggaatgaggctttctcagtcttgggtattcttaacataaattattgccaataaaagattagtagaatatgggtatctctatcaataaatgtgtgtaatacatacaaactccataatgtgatttggaaattatttttaagtcacctgagcatagggtcttccgactgtctatttgacctctgcaaaatgggttgaaggatttgtggaaaagatacagacacacacccgtgtgtgtgtgtgtgtagtatatatgcgtatatatataatgtgtctatatatacacacatatatacaatatgcatgtgtgtatatacacacactcatatccacacattatatatgtatatatatacacactcatatccacacattatatatgtatatataagaccaacatgaacttatatccactaatattatccactcattgtatacatatacataatagtataatcataatatgtatacataatcatacatgaacttatatccactaatattttccactcattgtatatatatacgtaatagtaactcgttatacacatatgtataaatatgtatgtgtatatatatataccaacatgaacttgaatttaaacttccacggttaccatcttagtggcatttggtatattgccacccctgttctgggccatggtcccttcactatcaaaagagtaaaaataaaaataaatgtgtatgtatttcttatcacgattaagtgggagaatatctgcaaggcactcagtgtagtataccacttttatttgaggtgtatcatatgacttgtattgattgcttaaagttttccactcatttaaaaaatttggaggctgagaaatgactgctgtttttactggtcgggattacttttttataaatcagcgtttttgaaatgtaattgttagaccatcaatgtactcattctaagtgtaaaattcaatttgcatcaatctggtttagttctggttcttggtagcctctcaaactattttgagggatgaataactcccccccaccacgttcattaaaatttgcaggatatttacagagttatatagccatcatagcgatctaattttggcacttttccaccaccttaaaaagaagtttcttctccatttacagtcatttttcactcccaccccagccctaggcaattgtcaatctatttctgtccatatgtatttgcctttttggatattttatatcaatataatacatgttcttttgtgtctggcttcttgcaatgagggtaatagttcagatccagccctattgtagcagatatcatggcttcattcggtaaacttgaatttttttattttttatttttatttttttttatttttattttgagacagagtcttgctctgtcgcccaggctggagtgcagtggcgcgatctcggctcactgcaagctccgcctcccggattcacgccattctcctgcctcagcctcccgagtagctgggactacaggcgcccccccaccacgcccggctaatttttttttgtatttttagtagagacggggtttcaccgtgttagccaggatggtctcgatctcctgacctcgtgatcctcctgcctcggcctcccaaagtgctgggattgcaggcatgagccactgcgcccggcttgaattttaacttgaattgtagattgctcttgctcagagtcaaatagtgagtagacacaaagagtacctattaaattcagcagccatgttgctctcctaattggcccccatatatttttattccaaattctctgaacaggcttaatgctacttcacaacagtaagcggggagaggggaagagaaagagcgggaattaatatgtgctggcaacaaagaatagctcataggagccttaagtgagcccaagttggccgattttcagcccgttccatatagtgatggtgtcaaatagaaccagcaagcaacataccgcatctctccccaaactgcttttcatatgttgctcagtacttctcaaaatatcttgaggaaggaacacttttcccctaatccattgtatgtaagatagaataaaaccaaagcgttacaaaaataagatgcccaacacccatgcttcctcctttattattaaatacattagacataaatggtactctgtaaaatcgctacataagtttcttgatgcactctgaattgttgactttatcttatggcatagtaacaaataattcctagagtgaatccagtttgcagatcccgctttgcgtaagacagatgtaagttttgacaaagccagcagaagaactcaagcatgcacagagctccaaaaggcactctgaactgtatttattgtttatactacttcttatatgatcttaccatttttaaaaatatcctgaagccctttccaactccatctgaactagtccaagataagctttcaagactattatgtctgataatttcttcacttgcttgcaagttgttcatttattattatttttttattttttatttttgagacagagtctcgctctgtcacccaggctggagtgcagtggcgcgatctctgctcactgcaagctccgcctcctgggttcatgccattctcttgcctcagcctcccaagtagctgggactacaggcgcccgccaccacgcccggctaattttttgtattttgttcagtagagatggggtttcaccgtgttagccaggatggtctcgatctcctgaccttgtgatccgcccgtctcggcctcccaaagtgtttggattacaggcgtgagccaccgcacccagcccatttttcattattagcatgtggaggcgcttttgcaatgaggaatatcagaaggaatgctttttaaatctttctttgtctgagacctctcttatagcctgttgtttttcatttatgcccttgaatcaccatatccttgagactgcaagactgtagactcttcccagcctctgcttacttatctcatctctcttatatcacactgccctgttctaaaactattaagcacactttgaaaaattatcttgctcagtgttcatcataatccagtgaatctaaaaatgtgtttttcttttttttttttttttttacaccaacattacatattttcttcctattaaatggtagaagcccttgaatttcagcaaagattaaaggacattttggtcaacttaatgtacattctagatctatcagataacgagcggcatttacagatagaaccatgttggcccctttttctaatgcaacatactatgttattaatagtgccatggaggacttctcattgaacttgtgaaaactcaggaatgcaaactctgttttcctattactgtttttctactgtccatctcaaataaaattgctagcctaaaacagtaacgcatattttgtaacataggcaggtttgaacaaaattgcaaagcatataacatgtgtttggcatctttttcttccttcttaagtgcaattctttttttttcggagtgctaaacttggctctggcaaccagctggttgtaataacaaatcttgctaacagtggtgagctatcagaagtcaggtccatacttttactggacaattcaagggatgtacttaatggcaacgctaattcactttagaatgttcatattattgatacaatttgcaattacaggagaatgatgacgttcgcactgctgaaagccatccctgtaaattcctgcctaccaagtcacttctgtgcaagacagttcttgctctgctcttctgcagagcttcacagaaactatccttaccatataagattattcctaccctcttcatttctattcctctgctgcaacttcttttaatcacagtctgggttctggggagtagacttcggagttgagtttggcaggcagcatgtttattaagccatgccctggaaaaaaaaaaaaaaaaaaaaacacctgtagaagggcagaggtgacaggagtggaaagaggaagaactagagctgtgacgtagaccctatgacacgcttattcaaaccccatagacaacttgcagctaggatgacccctcagagttgtctcaaatggggttaaaatggctgagtgtttatactctgccccttcatcagtcaatagtagtgggttgccctagagagggtgtgacattggctggcaggactctgcaactcaggtggtacctgagagaactaacaactagaagctgcctgaccacagctggagcaacaagcccttccttgaaggtcaatcttggtggtgcacctccatgtccatcatgccttcttggcccagttaactcctagtcatttttaaaaatcactgctcaaagacatttcaacttttttccttttaaaaattgatttatagttgtatgcgcgcacacacacaaatacatctgtttaaattgagcctcctttagagacagtgagacctgaggacgggacagttttctgtttacaggctcacctttggggaccagctcaatgattttttgataactgccttttatgtaggaaaaggagacatgattatcatacattgccctttattatttttttttgtctgagcaacatttgcacctaagtagaagcaataacagcgaggctgaggctgataagctgaattagtgacataatgatgctataaaggagttttggattgaatactttgttgtcctttaacgttatgcacatagagggcagactggccaagcatttcacaaatgaatcacattcatcattggaggattgcttgattattgcaaatccattaccaccattaagccactatctgctgattccaaccgtaatttagcacaggacacaaaatacacctcctgcagtcactgtacataaaggttgagcaatttataattttagaatatgagacaaattacgtaattatttgacctgtattcactgagtaactgactaaataagtaggtcaagaaggaattaggaaaacttggataatccactcctaaataataggcttagttatcaagggattgtgacagatacatgcaaagatttcatatctccgaatcgttactgtgtttacaaagcatcatctcaaatcttttaaaagtatgttaaaatgagatttagtagtatatcctaaaatttgcatttactttttaataaaaagatgactaacattggagatgttaaaatatgcatttaccccaaaggcatttgttaacttctatatggatgaaaaaataaaattgtcatatttagaatgcacaataaatattcatcatctgatcaaatgttgatagtatatgaaccttaaccttcccagaaggaaagtgcttagtggtacagactgatcacttttacatagatgtcttcttccagcatctcataaggggcttatatttaaaaagcagtctttaataaataataattctttaataaaagatgtagacagttttttctatgaagcgtcactgcattcatgaaacttagaaaaaatgcttagaatggatttctgcatcagatgactcagaagaattaaacttgataatctgttgaataacatctgcacatgcacgaagcctatgagacaatcaaatacatggaaaccaagtaatgaaaatagaaccaaggctacatatgtacacctcttagggataaatatttccttcctttgttgttttttttctttattttaggtaggcaaacatttctgtcttcttttcagttcagccaataaatatagcttgcgttaaatgatggtatgaaatcaggggttttatctgaccatattttgtactttgatcttacactaaccttgcatgtaagatacacagaaatgaggcctagaagaggttaagcaacttgtccaattaccacaattaatagcaaaggcaaaatttgaacatatactttaaaaaacaattatctatagtattcctcctatccaaaaagcgcttttatatcttaagtccttggttaacaataagtctaatgttttatacactgtcttctctagcttgttcattgaaagctagaaggtgagcaattctataaacagtaaatgttgggtctaatatggcagaatccaggagtaatagtgaacacattcagtaaatggtatggcatagataccaatgaatcagaatagactcctagcctttgagaatagacttaacttctggtagaatctattatgtctcattactaattggccctaaaatttctatttatcactgaagatcaaggacattcatatttaagtttgcatggttcttgctcaaggaatgcattttcttatgaaaatttatttccacatgtaggtcaaaaatgtaatgaaaaatatcatggctggattgcaacaaaccaacagtgaaaagattctcctgagctgggtccgacaatcaactcgtaattatccacaggttaatgtaatcaacttcaccaccagctggtctgatggcctggctttgaatgctctcatccatagtcataggtaagaagattactgagacattaaataacttgtaaaagtggtgatttagactctgatgacatatttttccccagtatggttccagatcatgtcctactttacaacatgttatgtacattgaccacattgatctaacgttccattggaatgaactaattaagaatattttccagtgttctatgggatacatataattcagttgttgaaacattaacattagcggagcgtgaaagtggttatagtggagggggagagtatcaatatgtttgacactgggaatcccagtaaatccaggttgtattctaactttgccgagaatggtgttggtctttttatacagataatgtgtttgtataagcctaaactatacaggtaaaaatgatactagatctcatgtgagtagttgtagttaaattaattaccatcatcagatacgtagtgtggagaaagaaacatctgtcttatcagatacacactttgatatcaaacaccataaagccctgtatactttgttctagttcagggtcataagatgctcagagcatttttagtaaccaagacaaagagcagaacacaattaattatatgacacaatgttttgaataccaacagaaacaattgcactggaacagcaaatcaattgctataaagcaagagagagatcttttgtggattttaataaaaagaattcactgtaatacagtgaaccaaagtccttaactatattccattcaacattatatttcttaagatgaaaaagattttttttgcttttcttgtgtaaagttcagtaaatgaattaataacagttcaagaaaaagcaaagcagtgtaggaaatacatatgtatatgtacacatacacttagagatacaatatatactatatgccatatatactacaccatttatactctatatatgtatatatatgtgtgtgtgtgtgtgtatatatatatatatatatatatatatgcttgtgtgtgtgtatttgagagagagggactacagtcactttattttggtcttcctgttacccgtttcatttacccaacccagggctaaatgcattgcctaattaactgtttaaaatgtcactggactgcatcttgcctaattttcagtgcaagttatgttttctcactttgatttttttttttttttgaccactctaccattttcctatgccaatcctgcttctagaaaagctaagaatattaattttctctaaggtaaagctcagtccaagagcaaacacatttcaaataagcatctttgtcaggtgtcttgctccagctggatttaattaaccccatcccgactgggtttccaggtgaattactcagcaacctgatttagaacagaggcagacatgcattcaaatgtcacgttaagcagcgttaacacattgtttctcgtatgacagaagaaaatgtttccacagcctcaatacagttagatgagaagggatagagacattctgtctgtgttttaagtcaatgctcatttatgcagccacatgcttaacactaagggcccgaaaatattgattttgctgttcatgtacacatttgcagatgaataaaaatatcaaggatcaggttatgtggtccttgttggctctctaacgtttttcccttcaagtggaagacttcaatcctgcaagcatgttcccactctatatttgttaatattctatttaatgatttctgaatacatttgtaggtaatacagtaaacatacccaaattgccctgttttatctgtccctgacccactctttctctgtcaaaatatcctcatttatatactctctcctgtcatattggatgaatcatcagtaactctctttatgtattacatggttacttttcaagaggttcttcacagttgtttaatgttctttcatgaatcatctcccccttctttttgtatttggcagatgttcatattctttatctaaagaaaaaaatggttgaactctctgttccatagcgattgtcgttggcacaattaggaatgtcatgaggtgccctcatttcaataattgagtggttcaactatacagaacaaagacatgtagttaatatagagcataaggattgactaagtgtcatggcagttaaaagttgtgtgataaaacgcaaagtccactacaatacccttcaaaggaagccagatttctactttttgtgttaaaacccaatgataattgcttagaaatatgtacaaaagatgcagataaaattacaataactataaagttacaattgtcttcctaaatccttattttagtgtattaccacagcaaattagaagcaaatgaacactagaatcaggagcaaagggaaaacagaaacacaatgtgtcttcatgaccccaatcttaacttaccttatttcaattcttagatgcagtcactgtcagctacttgtactttggttcctgctggttataataatatgtgtgataatgtttctacttgttgacaaactaatttctaacagtataggtatttactccatagtatgaaaaccagccatattatgtttcatccccaggtatttcctaattttattacttataatcattttatagttgtaatttttgcttttattacattaaatggtatgagtatacctcattttaaatttttaccaagtttagaaaggaacttttgaccaatatgaaaaacgagaaaatcatcacacattcttactctcgcctcttctccacctcccatttcggattacattctgtttgcatcagtagtatttgtaacatttatatcagttctgtaaagataggtgtttttggcttgagtctgtaaattgaaaatacatcactcttcttatataaatgtaattaacattacagcaaaataatagaaacgaatgtttttaaacaattattattttgtagacaccgttctaggtaaaatattcaatcaagttccatgacgtagatgctgtcattttacccatctcacaaatagataaattgagtcatagagaggttacgtaatttacctaaaactgtttggctaacatgtggtagagctaggatttaaatttacactatcctaatcatggtgttgatttaattaaaaatctggtgatccttggttgcaagtcaataaattatggtccaggttaacattaaatgctgtgtgggtttccttcatagttggttagttttacaatttttatgcatttgaaagtcatagatatttaaaatgttaattaattttaatagtataaaagaattcaattcatttttaatgctagacgtgacctcaaaggccttttggttcaatgctttttgaatgagaatgccaaagctcaaataaattatatgacttagataagatatccacacactcagttggttagttagtggccaaggaaatggggaaggtaagacaagggaatacagcacgaatgcataagcaatgctcttttttctcatcatactcaatttaaccttgtatactatgccatagatgagaaaactagtttctcatatgttcccacctatgtcctttttttactcccattgcctacagaaaaaaatgaagataaggcagagtgcgcatagtgaacttaaaagtcccctaaatattctacaatttttaaatttttttatatatttttcataacaaaggcattatccaatttgtaaataagctagtttccataagcttgttagctgttaggggtattggaaaatatggagggattcgatttcctaataattgtaaaaattctggtgtattaactagagtagaagcaattaagaagaaaccaataaacctatacctttatttatgtatttttttgagacggagtctcgctctgttgcacaggctagagcgcagtgggccaaccttggctcactgcaacctccacttcccaggttcaagcgattctactgcctcagcctcctgagtagctgggactataggcacgagccaccatgccctgctaatttttgtatttttagtagtgtcggggttttaccatgttgtccaggctggtctcgaaatcctggcctcaggtgattgacccgtctcggcctcccaaagtgctgggagtataggcgggagccactgcgcctggccaattttgaattacagttttagaaaaataacagctaaactacctttgtaactttttttttgtttttttcgttattttgtttttttgtttttgcatagcatgagctcttaaacaggagtccattaatagattcaaatattctaaaactgtatgtagactctgttcacagatatggagagtttttttgtaggagtagaagtttcatagctctcaacagattctcaaaggtgtctgtgattcagaataggtgaagaaccacttgactaatgacttccagtgctgttgggataaattataatacgttaacagccaacaccttatgcaaactcagccagtttctttcttttaaacctatctcccaccacttgatacttagaatcttccaatggagccaggcctgtgaggtcttgattatctgagcatgttttgcttttttccttccctaagaactttaattctctaacgctcacacaacttagaattctattatcaatacattttttttaatgcaagtcgaaacgtctatttaatctgtctttcagcctcagaaaactttcttgaccgcttcagattttacaaaacattttcttattgtctgtgttttttcacatttagagtttaattaattcatatggcttcttcatttttcttgctcattaaatttaaaatccttataagacaagaactgcctcttacactcctttgcattttctctattatcaagtaacatggtatgtaagtttcatgtgctcatccattctctcgtgtagttgataaatatttgttgagcctttattttgtgtcaggctaggtttccagcagtgaacaaaataggcaataaaagattgtacattctagtggaagagaaagatacacagagaaatttaattaaattatataatacgttaaatagtaagtgttaatgagaatagtataaagcagataaggagaaagaaaataagtatatgtgagtttgatttgaggcatgcagttttctttcatttatctatttaggagactggttcttcctcagtcacccaggctggagtgcagtggtacaatcatggctcactatagccacccaggctcaagtgattctccaacctcagcctcctgagtagctgggaccacaggggcatgccagcacacttggctattttttttttttttttttaataagttgtagagaccaggtctcactatgtggttcaggttggtctctaactcctggcctcaagcaaatccttcagcctcagcctcccaaagtgcttggtttacaggtgtgagccaaggtgcctggccagcatgcaattttagatagggcttgggcagggaagaacttatcagtgatgtgattttcgagtaaagacccaatggaagtaaaggagtgagccatgtttatgtcttcgaaaagcgaattccaaatccaagtgcaggaaactatggatcctgtttatggaatatgaggaaagagacaagaaataaaatcagagagttaatagggacctggaccctgttggacttcgtagatcacatgaaatacgtaatttgtacttcccctaaagcagagatttgagaagacggatatgatgaaacatgttaacagatcactctggcaactctgctatgcactaattaacgcaggcaagagtgagagaagagttatgaggctattgtgataattcatgcaagataaaatggattttggactagagtgatggcagtgaggatagtcagaagcagtcaaattctgaatacattttgaattaaatgttgtgtgagagtaaaatagtcattaaggatgactccaagggtttttatctgagcaactgcaattttaaacacattgttcattattgaggaagggagaacagcaagaaaagtaggtaggtttgggggagtatgatgaggataaacatcagaagctcagttcaggacacttgaagcttgtgattactaaatggagataatgagtgtttagaagaatctataatttgaagtttagggaagaggtctgggttagacatataaaactgggcattaccagtaaatggctggtattgaaatccacgagactggatgagatagataaatttttgttgcttggataagctagcgtagattatttgtcatcttcaggattttcttttttccccacatctttattgctgtataattgacaaataaacgttgtatgtatttaaggtatacatcctcagcattcttttttgatacagggtctcactctgttgcccaggctagagtacagtggcacgattatggttcactgaaccctcaacctccctgggctcaggtgatcctcccacctcagccttctgagtagttggaactgtaggcatgtgacaccacacccagctagtttttctttctttctttctttctttctttttttttttttttttttttttttttggtagaaacaaggtttcaccaaattgtctaggctggtcttgaacttctgggctcaaaggatctgcccacctccgtctcccaaattgttgagattacaggcatgagccaccacacccaatgagatcttccattaaaattattacttgtttaaatagaaatattttaaagggtaaatgaattacactcaagacttaaggactatgggcattggttgtcaatgaaaattaagcatggaagtaaatctcatggaacattctagattgatttatatttgtctttgtgtatgtgtgtatgtgtatgtgttttaggccagacctatttgactggaatagtgtggtttgccagcagtcagccacacaacgactggaacatgcattcaacatcgccagatatcaattaggcatagagaaactactcgatcctgaaggttggtaaatttctggactaccactgcttttagtatggtagagtttaatgttttcatctgagacttgtcatttctacacaaaatacaaaactacatatcttaagttttccaatactgtagatatatttaaaatgttcagccttcttgcactatattatgaattgtcttatttaattctagttctcaaaataccagtatctaaaattgcagtgaagacttttaggaaaaaagcctttaaaatgtgtatgccctatggatggagcatactgcatttggagtgcattgactccaaataattataaaaagttaatgttttgcttatgctaccaagagatttgatagagtaatcagctataattaattagctactcttgccaatttcattcatatactctataaaaggcaacatggtttactatttaaatcaggaaatctattcctgccactacttctgttgtaatttttcactctggggagatcctctgttggatggttactcattttctgcttctttagttgataggcagaagtgtatttatatttttattacattacacttcaataactttgactcttatctctggtgctacatagtcataccttccagacgtagagattacagagataataacactgtgacctctactcttcttctagcctatgaagtacactttttgccatgccaattttgaaatggtagcctctgttctcaattctcaaggctttactacactctaaaatcaggagttggaaaagtgaaatcggtgggattgaagatgatatttgggtagaagctgttctacaatagaagctgataattaaatgcttttgggaatattaaatcgatttcatcaattccaaaacaggagatctttcaatatggatggtaggtcccatcaagaaaactcaaaaatgacccagaagacagccttttgccagtgaatttattatcaaccagaatctagtactcagttttgcagacgcagaagcctgattgcctcagatcatctagcagatccacattggggtgggaggagttaactttaagtttaaaaagtgatatataaataaaaatggaaattcagtaatcttaaatgagatataacaagcagcagaatattcacatacaattgacaaatatattgctcttgataagcacatgtacttgggaaagcaaattacaacaaaaatgttagtttgtgaagttgggatcagattaagttgacttgaaatgtttcttctcctttggataatgcatggctgaacactgaatactgtaacccctttttattgcttctatacacgatagtatccctcctacccctgtttttagctctaagggagaaactattaatcctacgtccttagtttgcagtataggggaggattactttactattgactcgtagtacacatttgtatgttttctcttagttcagtgaggtagaaagggcagacataatgaaaatacggacttcaacctctgaggataaagagctatactgtatgaatttgaaagataaggctgttaatatgtttgttttttattgaatcacatatggtcagttcccattattggggtgtatgctctagttattcttgtgtgtgtcctatcctttcataaaacagtaagagaagatttaaaaatagatatttttcttattaagtgacaaaatggcttttgacctctagtgctcctttgaacttacagaataggagtgcctaaatgggcatccacatcataatcagaaaataggtaaatatatacacctatgtatatatccacaaaaaatttaaatgaataaaaacaattttaaaaagtaggttgacgagcctgtaatcagaaaaaggcaggtacatgaatagtgtattttatagctaaaagagcctggtatacctaactccatatgctctcctaagtgggaagtatatgtagaaaggtacattgtatatcctataagatcaccattttactgtctcaaacttcaacaatttaaaatcaacaaaatgtaatatgaaatacaggctgattaatgaagatccagccactgcttatggtctcgttttcccaataaaatctcatatctgtaaagcctttctatatatagactcttccaattgaaagagcatcttatcgcttaaacaggtttcctgtttatttgcgtagaggtgtttgtagtattctctgatggtagtttgtatttctgtgggatcagtggtgatatcccctttatcattttttattgtgtctatttgattcttctctatttttctttattagtctatctagcagtctattttgttaatctcttcaaaaaaaaacacctcctggatttgttgatgtttttttttttttttttttttttttttaaatgtttccgtctccttcagttctgctctgatcttagttatttcttgtcttctgctagcttttgatttgcttgctctggcttctctagttctttcagttgtgatgttagggtgttgattttagatctttcccgctttctcctgtgggcatttagtgctgtaaatttccctctcaacactgctttagctgtgtcccagagattctggcacattgtatctttgttctcattggtttcaaagaacttctttatttctgtcagaattctgttatttacccagtagttattcagaagcagattgttagtttccatgtagttgtatggttttgagtgagtttcttaatcctgagttctaatttgtttgcactgtggtctgagaggttggttgttatgattttcattcttttgcatttgctgaggagtgttttacttctaattatgtgatcaattttagaataagtatgatgtggtgctgagaagaatgtatattctgttgatttggggtggagagttctgtagatgtctgtgaggtccacttggtccagagctgagttcaagtactgaacatccttgttaattttctgtctcgttgatctaatgttggcagtggggtgttaaagtctcccactattattgtttgggagtctgtctctatgtaggtctctaagaacttgctttatgaatctgggtgctcctgtattgggtgcatatatatttaggatagttaggacttcttattgcattgatccctttaccattatgtaatgcccttctttgtctttttttgttttttttaaatctttgttagtttaaagtctattttatcagagaatagaattgcaacccctgcttttattttttttgctttccatttgcttggtaaatattcctctatccttttattttgagcctatgtgtgtctttgcacgtgagattgctctcctgactacagcacaccatttggtcttgactcttcatccaatttgccagtctgtgtcttttaattggggcatttagcccatttacatttaaggttaatattgttatgtgtaaatttgatcctgtcattatgatgctagctggttattttgcttgttagttgatgcagtttcttcatggtgtcgatggtgtttacaatttggtatgcttctgcagtggctggtactggtttgtccttgccatatttagtgcttcctgaaggagctcttgtaagacaggcctggtggtgacaaaatctctcagcatttgctcgtctttaaagcattctatttctccttcgcttatgaagcttagtttgactggctatgaaattctgagttaaaaattattttaagaatgttgaatattggcccctactctcttctggcttgtagggtttctgcagaaagatctgctgttagtctgatgggcttccctttgtgggtaagccgacctttctctttgactgtcctgaacattttttccttcatttcaaccttggtgaatctgacaattatgtgtcttggggttgctctttttgaggagtatttttgtggatgttctctgtatttcctaaatttgaatggtgggctgtcttgctagtttgggaaagttcgccgggataatatcctgaagaatgttttcccaggtatactaatcaaacttaggttttgtcttttcacatagtcccatatttcgtggaggctttgttcattccttttcattcttttttctctaatcttgtcttcacactttatttcattaagttgatcttcaatctctgatatcttttcttctgctggatcgattgagctattgatacttgtgtatgcttcatgaagttgttgtgctgtgtttttcagttccatcaggtcatttattgttttgcctaaactggttattgtagttagcaactcctctaaccttttttcaaggttcttagcttccttccattgggttagaacatgctcctttagcttggaggagtttattacccaccttctgaagcctacttatgtcaattcgtcatactcattctccatccagttttgttctcttgtttggtgaggagttgtgatcctttggaggagaagaggtgttctgggttttggaattttcaccctttttgtgctggtttttcctcatctttgtggatttatctacctttgatctttgacattggtgaccttcagatggggtttctgagtggatgtcctttttgttgatgctattcctttctgttttagttttccttcaaacaggcccctctgctgcaggtttgctggagtttactggaggtccactctagaccctatttgcctgggtatcaccagcagagactgcagaacagcaaagattgctgcctgttccatcctctggaagcttcgtcccagaggggcacccaccagttgccagccagagctctcctgtatgatgtgtctgtcgacccctgctgggaggcatctcctaggcaggaggcacgggggtcagggccccacttgagaaggcaatctgtcccttagcagagctccagtgctgtgctgggagatctgctgctctcttcagagccggcaggcaagaacgtttagtctgctgatgctgcacccacagctgccccttccctcacgtgctctgtctcagggagatgggagttttatctgtaagccgctgactggggctgctgcctttctttcagagatgccctgcccagagaggaagaatctagagaggcagtctggctacagtggctttgctgagctacagtgggctctgcccagtttgaacttcccagcgactttgtttacactgtgagggaaaaccgcctactcaagcctcagtaatggcggacgcccctccctccaccaagctggagcctcaggtccacttcagactgctgtgctggcagcgagaattacaagccagtggatctcagcttgctgggctccgtgggcgttggatctgctgaacttgaccacttggctccctggtttcagccccctttccaggggagtgaacggttctgtctcgctggcgttccaggcaccactgggtattagactcccacacaataatagtgggagacttgaacacaccccactgtcaatattagacagatcaacgagacagaaaattaaaaaggatattcagtacttgagctcagctctggaccaagcagacctaatagacatctacagaactctccaccccaaatcaacagaatatacattcttctcagcaccacattgcacttattctaaaattgacgacataattggaagtaaaatactcctcagcaaatgcaaaagaatgaaaatcataacagcctctcagatcacagtgcaatctaattagaatgcgggattaagaaactcaaaagtgcacaactacatggaagctgaacaaacctgctcctgggtgactactgggtaaataatgaaattaaggcagaaataaataagttctttgaaaccaatgagaacaaacacacaatgtagcagaatctgtgggacacagctaaagaagtgtttagaagagggaaatttatagcactaaatgcccacaggagaaagtgggaaagatctataatcgacatcctaacatcacaattaaatgaactagagcagcaagagcaaacaaattcaaaagctatcagaagacaaataactaagagcagaactgaaggagatagagacacgaaaaacccttaaaaaaaaaaaactcaattcaggagctgtttttttgaaaagattaacaaaatagatggctagccagactaaaaaagaagaaaagagagaagaatcaaatagacacagtaaaaaatgataaaggggatatcaccactgatcccacagaaatacaaactaccatcagagaatactataaacatctccacgcaaataaactagaaaatctagaagaaatggaaaaattcctgtacatatacactcttccaagattaaaccaggaagaagtcaaatccctgaatagaacaataacaagttctgaaattgaggcagtaattaatagcctacaaaccaaaaaaagcccaggaccagacagattcacagccgaattctaccagaggtacaaagaggagctagtaccattccttctgaaactattccaaacaatagaaaaataaggactcctccctaactcattttatgaggccaacatcatcctgataccaaaacctggcagagacacaataaaaaaaatttcaggtcaatatccctgatgaacatcaatgtgaaaggctcaataaaatactggcaaaccgaatccagcagcacatcaaaaaggttatccaccatgatcaagttggcttcatccctgggatgcaagattagtttaacatacagaaaccaacaaacgtaatccatcacataaacagaaccaatgacaaaaaccacatgattatctcaatagatgcagaaaaggcctttgataaaattcactacccttcatgctaaaaattttcaataaactaggtattgatggaatgtgtctcaaaataagagctatttatgacatacccacagccaatatcatactgaatgggcaaaagctggaagcactccctttaaaaactggcacaagacaaaaattccctctctcatcactcctattcaacatagtattggaagttctggccagcacaatcaggcaggagaaagaaagggtattcaaattctctgtttgcagatgacatgattgtatatttagaaaaccccatcatctcagccgaaaatctccttaagctgataggcagtgtcaacaaagtctcaggatacaaaatcgatgtggaaaaataacaagcattcctatacaccgataataaacagccaaatcatgagtgaactcccatttacaattgctacaaggagaatagaattcctagcaatccaacttataagggatgtgaaggacctcttcaaggagaactacaaaccactgctcaaggaagtaagagaggacgcaaacaaatgaaaaaacattccatgcttatggataggaagaatcaatatcatgaaaatggccatactgcccgaagtaatttatagattcaatgttacctcattaagctacaattcactttcttcacagaattagaaaaaaactactttaaatttcatgtggaactaaaaaagagcctgcattgccaaaaccatcctaagcaaaaataacaaagctggaggcatcatgctaccttacttgaaactacactacaaggctacagtaaccaaaacagcatgatactggtaccagaacagatacatagacgaatggaacagaacagaggcctcagaaataacaccacacatctacaaccatctgatctttgacaaacctgccaaaaacaagcaatggggaaagcattccctatttaataaatgatgatgggaaaactggctagccatatgcagaagactgaaactggaccccttccttaccccttatacaaaaattaactcaagatggattaaagacttaaatgtaatacctaaaaccataaaaaccctagaagaaaacctaggcaatacctttcaggacataggcatgggcaaagacttcatgactgaaacaccaaaagcaatggcaagaaaagccaaaattgacaaatgagatcttactaaatagctcctgcacagcaaaagaaaactatcatcagagtgaacaggcagcctataggatgggagaaaatttttgcaatctatctatctgacaaagggctaatatccagaatctacaagaaacaaatttacaggaaaataaccccatcaaaaagtaggcaaagggtatgaacagacccttctcaaagaagacatttatgtggccaacaagtatgtgaaaaaaaagttcatcatcactggtcattagagaaatgaaaatcaaaaccacaatgagataccatctcatgctagttagaatggtgatcatcaaaaagtcaggaaacaacagatgctggagagaatatggagaaataggaatgattttacactgttgggagtgtaaattagttcaaacattgtggaagacagtgtggtgattgctcaaggatctagagccagaaataccatttgaccaagcaatcccatcactgggtatatacccaaaggattataaattattctgtgcttatttcagcactattcacaatagcaaagacttgaaaccaacccaaatgcccatcaatgatagactggataaagaaaatttggcacatatacaccatggaatactatgcagcaacaaaaaaggatgagtttcatgtcctttgcagggatgtggatgaagctggaaaacatcattctcagcaaactaacataggaacagaaaatcaaactcggcatgttctcactcataaatcggagttgaacaaccagaagacatggatgcagtggagcatcacacactggggccttttggggtgtgtggggctaggggagtgatagcattaggggaaatacctaacatagatgacggattggtacagcaaaccaccatggcatgtgtatacctatgtaacaaacctgcacgttctgcacatgtatcccaaaacttaaagtataataataaaaagtttcttaaagtttacttatggctgcaaataagatgaggattcagcataagtcatatatttttaaaatatgtcaattcttgccattgtgttagggaaaccaccaagtacacatttatacatttttgctcagcatttttcaggagataatctcaatgatgattcaaagaaaaaaataataactcataagaatttttatttactgactgcttagtcacaaaagacagaacaccatctcttgaagtctcagacttagaacactctcttcgatagatttaccagcaaaattcgtgattcatgcctgtatagtaattgcttttgtgatgttcatatttttatttaaccagatattggttctgtagcttatgcatgatgttggctactctccaaagaaatttcattttaaattagttatgccccttaggagaataatgaaacatttggggagaattttattattgggggattgaagctatatttggtttaagaaatacctgccaaataatgctttgacaattttaaacataagctttgttgatagaattgctttataaaattaggaagtcattgaaaccttgtaggatttcatatatagaatttgatatgctttggccttaactggtgttttgaggcctgaggtttagttttaagtggaattgccttttaaaatgagtagcagtaggcattagcataagcgatttcaggagctgtttctagtgtgtttagatgctaacatatgcaaaaataagtacatctagggtaaacttaataaattatgtatgtttatgctcatagataataggtatatctctttaaaaatatccttttgtgaatcagacaattctcttcccgttatgatttctctgtaagacagtacattctacatgcgttggtcgtgggtttcatatacattgtttctctgagtttcaaacagattggtttgtttgccagtccaaaaaaaaaaaaaaaatcctccctatattaagagagtgctttgtcagctttcccctgtgaataacaaagtgaggatgttctctttaaaggaataaaacaaaaaatcagggataaaagattgcgcctgttctagatgtcttttgaatattagtgtagaaagccatttccatttaggatatgaaatatgatatggaaatgttcttacttatttaccagggtaactttagaacaaaaatgaataatgacagtcaaatttgaccaaaaaaggaaggacactaggactcgagagaaatttttgtatcctcaaaatgacatttacaaacccgttagggtttggttttaatcccctttattttgacttcctgagaatggtgacacggattctattttctgcttggctaatccctgcatcactcttgagttgtttttatagccttcttttccaagaattagctctgcctgttggaaagttttactcctggagtgaatgctttcagacttggctttgtatgcatgcaggattttaacctacaaaaataatcatggaaagatacatagaatttgctataaaagagaagaatatttttaaggcctcttatgttgggtttgatatcaattggctgaacaagggctgttttaacttttttccgcctctgctgtaatcatcacattttgataccataatggcaagaaatgtttataagtttacacaggttaaaattgagagggttaattctcaggaggattagagttaatttaaataaataaatatttttgtgaacataaacactaattttatatcatttagattgatttttgtctagaactcattatagagtaccttgttttcagaaaatctaatgcgattgcaatattataggtgttccttctctatatacggtatttcaactagaaatccttactgtaaatatttcagacaatttagagtcaaactctgcagttgaaaatatatttaagaaaatatttaagaaaatatttcactggcacttacatgaatgaaaaatggccattgcctttttgatgacaaagtaatatataccaaataggtatgatacagatgattatattaacattcagatattattgtagcaatttcctcttccctgatgggaaatcttgaaattgctcttcatgacaaaaattaagacgtaaatgttatttcccagtggcctaaaagttagaagaggcatgagagtattccagtgtgttctcttgatgttatgtgttgtacatctttctcagttcagataccataaaaaaactgagtattttctgggcagttggaaccagtcactaataaatgaaagcaatttttgttctccttatccatttcagttgtttggatgacaaataattgcatgtaactgtcccaaattcacctacttagacaacagagacttgaaaaacattaaatatgatatttgtgtgtgcgggagcctggcttgaatttaccctttataacaaattttggtattttctactaatctttcacattcttctatgatttgtcaccattttaactttatggaaaatggtcaatttataatttctatctcccctaggggctgatttgttaaagtatgctttagttaagtaagagtttcttactcagttggggaatttaaataatgaagtataatcatgcgattgaagatgtgcattatggattaggttctatgccaaatttgttcagaaacatttaaatataattcttacctagataactgagaatctcttttcaattagcttaccaggattattttcacaactttttttttttaattacaggtgaaataacaatatccttggcctatacagtgacattaagtgatttttgaatgattgacaagacattaataaattaataatgagaaatgcagccatgaggttctaatgctaaataatatgtaatagacactttgtggatggttttcctagtcatatcatcacaatgagttcatgagactaaagaaatatattaaaaacatctattggtatttgttaattttatttcagctatgaaggaatacatgagatattaggtttgattcagaaaagtgttctatagttgatatctgtgtttcttgtcacagaattttgccttggcaaaaacattttgaccattctaatgatggtaaatgagaataaaatggcataagtagtttaaaattttctatgtggttttaagtcagtgataatatttgaatgtaatgtatattttgctgatagttggaaaacttacttcactgtcttcaaaatggagttaactgtgttttatacataattataagtgatatcacagggctgggtgtgatggctgacacctgtaatcccagcacattgggaggccaaggcaggagaattgctttaggccaggagttcaaggctgcggtgagctatgattgtgccactactctcaagcctaggcaaaagaactgaggccctgtccccccatcccacaaaaacaaacaaaaaaagacatcacagaacctgcaaatgaatatccaaaaaccttaaagctgggcactggaaaaatagatattaggttggtacatatgttttccaattaaataatttctatatataaaatgcatgtgacattttacagctggaacatgaaatataagatgaaaatatactattttacaacaatatttgggtaaaataatgatgaactaaagtctttgttgatgtcatttaaatcttataagagggaaatttaattgtcatacaataggatttattccttgcagagggaaacctgaagatttatagttgtcttgtcattttattttaaagcaataagctatcctcttagatttattctctttttagaacttttatttttattgatgcataacgttttacatatatgtacatacatgtgatattttgttaaacgcactgaatgtgtaatggtcaagtcagtgtatttggggtattcattactttgagtatttatcatttttatgttctgtgaacattttgagttctctcatctactttgaaatgtacatcatattgttgctaactctagtcacccctttctgctgttgaacattagaatatataccttccaactatatatttgtacccattaaataacccctttttatattcccttcctacccttcctagcctctggtatcttattatactctctatttccatgagaacaactttttttacacctatatatgagtaagaaaatgtaaaatctatttatctttgcctcgattgtctcacttaataacctgcagtttcattcatgttggtgcagaaaatgtaattcttttttatggatgaagagtattccactgtatatatgtaccacattttctttatccatttgttcactaatggacacttaagttgctattataaatagtgcctcaataagcatgcaagtacaggtatgccatgcatatacttttcctgatagttagaaaagtatatgattgctttccctttacatatatacttattagtggcattgctgacacatactctatttctatgtttagttttttgagaaatcttctccatactgttttcaatagtggctatactgacttatattctgaactacaacaatgtattaagagttcccttttcgttgcacctcgtcaacatctgttgttttcttgtctttttaataatagccattctaactggggcaagatgatggctcatcatgacttgatttgcatttccctaatgattagtgatgttgagcattttttcatatacccgttggtcatttgtcttcttttgagaaatacttattattgtcctttgtccatttttaatgtgattatttttttactgttaaattgtttgggatcctcgtatttcctagatattagtctcttgtctgaatagtttacaaatcttttctcccattcagcaggttgtctcttcactctgttgaatccttcctttgttttacagaagctctttcattttctacagtcccaattatctatttatgtttttgttgcctgcgcttttgaggtcataaccataaaatctttgcctagaccaaggtcctgtctgttttccctatgtttgcttcatgtagtttcagttttaggtcttacctttaaatccttaatccatcttgagctgaattttctaatatggtgagagacagggatccagtttcatacttctgcatctgacaatccaattctcagcaccatttgaagaaggtgtccttccccctaatgcatgttcttggtgcttttgtcaaaaacaagttgtatgtaaatacatggatttaattctgagttctctaatctattccattgttctatatgtctgtttttattctaacaccttgctgttttgtcaagtagtgtgattcataagtctttgttctttttgctcaggattgctttggctattcaggctctctgctggtctttgatcgtacaaattttatgatcactttttattccatttctgtattctgatagggactgcattattcaatgtagaatgctttgagtagaaagatcatgttaataacattaattcttctgaccgataaacatgggatgactttccatttgttggtgtactcttcaatttgttttgtcagtgttctgtattttatacggacctttccctcctgggctaaacttactcctaggtattatttccagccgttgtaaataggtttgccttcttgatttctttctcagccagttcattattggtatatagaaatgctactgaattgtgtatgttgatttttgtatcctgcaactttactaaatttatttatcagatctgagagctttctggtgagggtttagctttttctagctataagttattaacaaagagcagtacttggacaacgatttcttctattaggacgccttgtatttctttctcttgattgctctggctaggacctccagtactatgttgaatgagtggtgaaagtgggcatccttgtcttgttcttttttttgtttttggttttttgtttttgagatggagtcttgctctgttgcccaggctggagtacagtggcccaatcttggctcattgcaagctcagcctccagggttcatgccgttctcttgcctcagcctcccgagcagctgggaccacaggcatctgccaccatgcccggctaattttttgtatttttagtagagatggggtttcaccgtgttagccaggatgatctcgatctcctgatctattgatccacccacctctgcctcccaaagtgctgggattacaggcgtgagccaccacgcctgaccattccagttttatagggagaaatttttcagcttttccccattcagtttgatactacttgtagatttgtcatatatggtctttattttgttaattttttttgtatgcctagtttgttggagtttttatctcgaagggatgttaaattttatgaaatgttcttttgtgtctattgaaaggatcatgttttctgtttttcattctgtttgatgtaatatgtcatatttattgatttgtgtatgatgtatccttgtatcattgggataaattccacttgataatattacattttttatgttctattggattgctagcattttgtagagaatttctacatcagtgttcatcagggatgttgtcctgtattttttgttgcataattgtctgggtttggcatcagggtaatgctggcttcatagaatgagatagggggaattccttcctcttcaatttttcttggaacacttacaggagaattggtaaagtttggtagaattcagcagtaaagacatctggtcctggactgtcttcgttgggaaattttttaagattactgattcaagatcattactaattatagatctgttcagattttctatttcttcttgatccacggttggttgtatgtgtccgggaatttatacattcctctagatttttagtttattatttaatagttgttcagtatagtctctgaactttttatttctatggtatcagttgtaatgtctccgtcttcatttatgattttgagtcttttttttttcttggttagtctagcaagtgctttattttcatctttttaaaaatcaaacttctcatttcattgatactttgtattttttgctctctattttcttgagttttgctcaatttttaggattttcatccttctactaattctgggtttggtttgtttttttttctttgactagctccttgaagtactttgttagattgtttgaaatatttcaacatttttgatgtgagcatttttgctatatacatcccccttagcactgcttttgccatatcccgtaggtgttattatattttgatattcatttgtttcaataattttttgaaaacatttcctcaattttcttccttgacccaatggtcattcaggagtatgttgttcaatttccatgtttttgtacaggttccaaagtttctctttttgttatttccttgtgttttaagaagatattagatatgattttgattttttataaatttgttaagacatattctgtcataacatatggtctgtcctggagaatgttctgtgtgcttatgagaaaaaaatgtgtatgactgttgaaggaattgtcctataagtgtctgttaggactatttggtctaaggagcagtttcaagccaatgtttctttgttaattttttgtctaagtgatctaatgctgagagtggggtgttgaagtcctcagatattactgtatttgcatctagctctccctttagatctaatacttgctttatatatctgggagctctcgtgttgggtgtatgtatgtttagaatttttatatactcttgctaaacttatccctttatcattatataatgaccttattgtttgtttttactgtttttgactgaaagtctgttttatgtaagcatagctgctgcttctcccctttggcttcggtttgcataaaatatacttttccatccctttacttcaaatctatatgtgtctttacaggtgaaatgagtttattttaggcagaatatttttgggttatatattttttaatccattcagccagtttatgtcttttatgtggaatgtttaatcaatttacattcaacattattactgatatgtgagggcttatttctttcattttattgatttatggttgttttgaatattttttcttcatttttttccctcattatcattatagtgtgatggtattctttagtggtaacatttgagtaacttttcttgattttttttgtgtgtttgcactactagttgtttttatatttttatgtgttttcatgatggtagttgtcattctttcacttccaggtataggactcccttaaacctttcttgtaaggccagtatcatggtgataaatttccacagctttcactcgtctaggaactattttatttctccttgatttatgaaggctaccttggctgggtagagtatccttggctggtggttgttttctttcagcaagtttaatataacatctcattcttctctggcctgtaaggtttcttctgagaaattcactgttaatctgatggaggtttctttataagtgacaaggtgcttttctcttgctgtttttagaattctctttttgtctttggcttttgagagtttggctataatgtgtcatggacaagacatttttgaattgtatccctttttgagatctttcagcatcctgtatctggatgtctaaatctcttgctagacttgggaagatttcatctattattttgttaaatagggtttctaaacctttagtttctcctttaccttctaggacataaaaaatgcaagcatttcatggctttatggtgttgtatatgtcacataggctttgctcatttttttaaaattttttgttattttttgtttgagtaggttattttaaaagacctgttttcatgttctgagattcttctgttttatctagtctcctcttgagtctttgcctttgattctgaatgtatatagtagtatacttcctgtatgatttctttggatgtaaacagtatgaatggtgtctgtaacttcctcagtagcttagggtgcagttgttagcagaagctgtggtgaagttttgccggtgactgggacaccaagtggtccagtcttcaggccccagtggtggcatcagttggttgagcgtgcctgtcctcaggcctcagagctgtgtacattggcattgatgttagtgtgtccaggcaggctaaccctttggcttataggtggcttgcttggttgtcaggaaaagcataggtgggctgggtgggtacacaggttcccagcccaggggcagcaagcatggtgcgggtaatggcaatagtgggaggggggcaaccctctggaatgcaagcaatccatgatggtgttggtggtggatgcaacagattgggcaagccagttcctaggcctgcagatggtgcatgtaggttgacgccagctttggtggtagtggaagcttgagtgggcccaaattcaggccccaggaagactagtcagatgccaatggtggtaaactggggtgggagagccccaggtctctatacaaatttttatgtactgggggatttggaagagcagagctgggaagacctgtcctcaggactcctggtggtgcatgcaaccactggttattgtagtcgaggggcaaggtgctccccaggtcccttgtgcaatgctcaggtggaaggcagtgttggctacactgtggccctgctactggagagggtaaggttgctttccttgggagcagccataagcagttgcctgggtagcctgtgcgtcgcttgtgtctcaactccacagcagttcacagtgacagcatttgcaggcagtggaattagtcttcagtgtgcatgaagttgagtggccacccctctgttgggcaggggagggtttgctgccagtggttcctgccttggccccagcagttgcagccatgggtgggaaatatcactgagactccaggaatgtggagatagggaagatttttagtcctaggtcaggacatagactggtgggggctgggctctcaaaaccaggccatgttgcagctgcttaggactctagagtttgtggaacccagcatgggcttcttccgtgaagcaatgcctttgcacagtatctagacagctgtgtgttggtttgggggcccacacgggttgaagggctctcaattggctaggattgtaggaatcttgtacaagaatgtgtacctttgtgcatctctaattctctccccatgttagggagcctctccagactcctagccaatctcagctggatagagtgcctcatttccttctttttccttttagtggttttcattgcttctctgttgaatttcagtgttttctcttagttaatgtattcaaagtatgattatctacttggtactttggttcctctccatggaagaggtgagtaacagatccatcaattcagccattttgaagccccagattttttgtcttatggcaatcgtgtggagttagtggatcatatgatatccagttgaaaagtgagaaaactgttacaactattaaattattaggaattttatatattattacaatttaataaggtggttgaaaccagtgtttttacttttaggaaatatcctgtaatatcattcttgtgagatgttaatattgctgaataaacttttgcttcaaatcaaagcacatttttcccctgcaaagatttttctaatttatcatcagtgatataaactcaaatttgcaagttccttttggtagaagagtgcaaatgtttaagtagggcagtcatgttctagataatttccatactttatcttatgtcttgtacacaacaattccaggtaagtttatccttcttttataaatggaaaaactgaggcttagagagctttattaaaatcaagatcacacagccaatagataactgagctataatcaaatccagggtttatctcttcttaaagtccgtgttatttctcacaagactgtccaataaaatcggttggggaagctttatggcaacactgggattgaaactagtattttatttcactgaggacgggctgtgacatcagcaatttttagaagctcagtaagtgagagtatcctgcagctaagatagaaacaactacaatggaacaattgtttctgtgagatatgcccttttataggataagatccagaatctgttgtcccagcatttgtttagacttctagcattttcttccttaaaaaatgactaagcctgctgttcacatcttcaattactggagtactgcttattgctaacagttctgttaatgagaaattgttcatccacagacaaagtaaaaatagactagctgtcacataagactggccatcaaaacattctctttaggattaagaaacttgccttatctcctgtctgcacagttgtctctcttcattccttcttctatttattgcttcacggacatgtttgtgatagaatggtactctgactcaaacagtttccagcaagggttgcccaggtgagaggagctgtttgcagaggtgatccctgactctttgttctttaatttatttcttcttttgcctgcctctctcatcttgttactaattgacatcactgtgttctgctatctgaggtttgttgatgccttttgcagccaataaaaatgtctttcattggcagagctgataaagaactagaagaatttttaataataactaagggctaataagggaaaacaattaaaatgatggtaaaataatagttttcaaattagaagtctgatcccataaatccacttgaaataagcaaatggcttaattttatgatctctgatattaatgccataaataggttgaatttatttaccatttatccagggttagttttgctaaacagtttgtattttagccagatatgcaacttttactgacaggacataatgaactttggagcctgcactgttagtgtagttgtaaggagataaaattggcaattatactcacagatggaatagaatttaatctatgacatttacttagctgtacagaaggatacaaggcaggagatacactgtcatagaatctttgtatcattggatggcccagaagcaaccaacatacagatttccacatgcctctcacccaaatgtgctccatatagctgctaggacaacggccaaaatcagtgtggtttacttgacatgaagaaattgcagcattaatttcccaccaatatttaataccattgttgtcacataggacaaaagactatatattgcctctctgccccactccccagttaatttaatagtagtcctacctagcaaacaagagtgacaagaaattctactattatcttaactcttaatcctaagaaaataagtttctatgttcattttcctaggcagcatcagattaacctagggttgatttaactttttctacacagagccaactagttttgggttaaaatctgatttttgcctttattagttttaggccactggaaaattattgaggctcagtattgctcacgtgtaaagtaaaaatatttacctcccactgctacttcaaggagtaagtaaaacctgtatgtatttggcccgtaatatgagcccagaaacagtagctaaagttatgtcaaataactggaatgttgtaaaaattaaatggtccctttatactcctgtagggaaaactgatctttccagttattttgcctgcctctagaataaatgctgactctccccaaattaaatacaggagtcctcccttattcattacagtttctgctacccatggtcaaccgtggtccttaaattgatgagtacagtacaattagatgatggtggggagggtgggcagggagaggtgagagtccacattcacgtaacttttattactgcatattgctataattgttctattagttattaatctttttctgtgcctaatttataagttaaattttatcataggtatgtatatgtatgggaaaaacagtatatatagggcctatttgtggtttcagacatctgctgtaggtcttggaacatatcccccgtggaaaagggggatctactgtcatttcccatttgaaatcttgctggtcttcctgtgaccttcccactcattctggttttctggtctgaggaatactgctggctcacagctggtgtactgggtggtaatctttgatatccttgagctccagagtctaatctagttttcataaaagatttatactatatcttaaattcctcagagtggttctctctctctttctctctctctctctctctctctctcacacacacacacacacacacacacacacacacacttgacagagagattgattcacagttgtcatggatacatggtagatttctagcaagtctcctgaaggctggttcatgatagtaccttataattgtcatagtatttgtaagacattagttagcacacttgcaaaagtataactaggttttctcttgtagtcattacgtcatatgacatcgtaaaagtggttgaattggttcccagactctcagaaaaactcaacttctgaagctgggagtaatacatacatagtaatattgatgtaatctggtgtgatatttattaaacattaagtgctgggcacattgcttgatattgtataatttcgttttatttctgcaaaaactctaggaggtagagactattattttggtcatttgcaactgaagagtttatgtaaattgcccacatcactcagctagtgagttggagttaagattccctacttgtaactactacagaatataatcttatggcagaatattcctctcttcttccatgaatattttctttgcattaactaaaaggttactcattttattacagggctaattgggtttgtttttaattggatgcacatccatcagttgattccaaatgttttgaaaataaatggaaaagttttataaactagagccagaataagagggatactgaattctttttactatgatgtttccttgagagaatcattaaataattaaagtagaaggatgtttacaaatcttgcaagtatgacattctatccaagccacactaaagttatcaaagggagacactcaccagttatgaaaatattcccctctactctttctcagttaactctaaaattagatggcaaaggcatcaaaacatctcactatctcaaatatttcctcagtgaggtcgtgatgtgaacatctcttatctagattgaaatcccaccttgagtcatatgtggattaaaaaaaaaagctattatctgagaaagtctaaataaaaagatacattttacctaggctttaatatctaagtttttctgtatagaatcagttgggcaagtgagtctcttggaaaagtgatttgaaaactgtttttattaataattggaatacacacacacacacacacacacacacacacacacactcttattcctcctcaagaggcaagagtacatggtgaagcccttaataaattcacctcactgtagttaaacagcagactatgatattgttgtagttgttaatcaaagggactctgaaaagagacagccagaagtggggaaaaaactagtatagaaaaataacgattgggcatttgagtatttggaaaaaacctggtgaagtaactaggttttaaaagactgaagagaaagacaaatttcacccattgcaaaatataacaacgatataaaaatgagacataagctcctggataaaaataaataatgtatttttttctctctattatatctcgaattttgctttcaccaacaaactgcatgtgaaatacgaaaaaagttaaaaaatatggaatattaagggactataagatgagaaatttttaaattgttataacctaagtaaaactgctaaagctagttgtagcgagatctgtcttacataaattttccattaaatgataatatctttgcattcatcataaacagaaatgtacattttaagcaaaatcattataatagaaatgataatactccttacctagccttcttcacgttaatcttaacatagactagtgaagaacatagcaaaggtagtgcttgaaggaatgttcttattgaaagaaatctttcctcagattgatcaagaggcattgaataatcataataattcaaactttaatcttgcagatggaatgaaaatgtttaaaattagaattattgtcagagcttaaatattgttacttacacaagccaaatacattaatattatgagcactattgttttagctaatgtgtcttttactctgcagagtacatatagactagtctaaaaggttttttttttttaatgcttttatagagcacgagcatttgtgcaggtggctgagtagactaagattttttccaatgggttgatttgaccacatcattaataaagtagaaattctggagcccctactttttattcttagtctgacattgtaaattctttcagatgctacataagcattttaaagttatgtgccccaggcttactttgttcagtagaaatgcatgttaattcatcaaatgtctattgataactttacataaggaatagtgctatatactccaagtgtgtcaggaagtaaaagatatacagtctgccaaggtattgaaaattgcatataggccaacaaacaatatataggtaactgttatataagacagaatgtgaactaattcagagaatattttttaaagtacagagcatgtttttcattctaataaatgtacaaatatttatgtcaaatgaaaatgtggctgcatcataattcttatatgggattttaaatataccaaaatccacggatccatacagtagttcttactctgcttccctaattttattagttggacataaatgcataaatcgataagatgattttggagcgggaacctaactttttctatagttccttggaagttaattgatttcttaagtgataaagtccaccactattttgagtaaggtttagttaatgatttctgtttaacatgtgtgatttctaataaaaagttctggatttattttctcttgttgaaagttgttcattagaactgacacctgagctaacataagcaaaagtcattgtaagtccacacgtttgcacagatgggtgtccccccaccatccttaggtttgagcaatggatttttacaagtgaaactcagtgcaattaatcacctccaacatgagaaaatgctctttaaactattttaagtcaacatttacaagagaaattggcctataatacacctcgggttcttaacctttttgagagctatagaaacgctgcttctctataaaggtaacatatattgccaataaaatacataagggaggacatctacttataaaactcagaaaacgatttaataggaacagttgttttattagccttctgctctttaatggctgagatcatcctggggctatttaaaaatgatttaatttgtcctctaaacacacagatgagttccaggtgtgtatttcccccccccacccccgctccatgaatcaaccatgtctgcactgacattaatagcttggatcgggaaatctctgtaataataaatctatcttttaagttggtcatttaagcagctttaagtatgaaaaaagtgaagtattagaactatttcaatccatgatgccttatagattatactttaagaatacgactgtgcctcactatctgagaactggttctaggaactccagatactaaaatctgtggatgcttaagttccttatataaatgatgtcatatttgcatataacctatgcacatcctcctgtttacattaaattatctctagattacttataatacctaatacaatataaatagtacgtaaatagttgttacattttattctttgtgtttaatttctaggttcagggttacacatgcatttttgttatatagataaattatgtgttacaggggctctgagtacagattactttgtcacccaggtaataagcatagtacccaacagggagatttctatcctgttaatttttattgtatttcctgaatatttttttatttgggaaacaatttattttttttggaaatttttgtgggtacatactaggggtgtgtgtgtatatatatggtatatatgtgtatatatatgtgtgtatatatataccatatatgtgtatatatatgtgtgtatatatataccatatatgtgtacatatatgtgtgtatatatggtgtatatataccatatatgtgtatatacgtatatacacatatgtgtatatacgtatacacgtatatacacatatgtgtatatgtatacatatatggtatatatgtgtgtatatgccatatatctatatatatggtatatatatatacatatatgtatatacatatggtgtgtgtgtatatatacaccatatatgtatatgtgtgtgtatatatacaccatatatgtatatgtgtgtgtatatatataaacacaccatatatgtatatatacgtgtgtgtgtatatatacacacaccatataggtatatatatgtgtgtgtgtatgtgtgtgtgtatataatttttgtgggtacatggggtgtttgtgtatatatgatatatatgtgtatatgtatatatatacgtgtgtgtgtatatatatatggtacgtgagatgttttgatagaggcatacaatatggaataagcacgtcatgagaatagcatgtcacctcaagcatttatcctttgagttataaactaattacactcttgaagttattttcaaatgcacaattattgactatattcaccctattgtatcaaatcagaggttatttgaatttgcagatacagaacccgcagatacggagggcccactgtatatcactaaatcattcatacctctccacctgtacaaccaccaccatagttcaagttattctcatctttttctgtgactgcaggaagaacttgacaatgactggccctattttctttctggatttaacttaattctcttttacacacaatcatctagcatgatatttacatagtttaaggccttagcacttgctgttccaactccctgggatgttgttcttccactctgcatttcacagctgaaccccagaaagattatgtcctttgttgatttaacccttctcagaatagcatgtgtctctgttactgcatacatattgaaactattcttagttttttgttttgttttgtgcttatgttatcacatactatacacaccaagtctgtaggctgtttttttgatattctagtgatttttaatgataatatttaatacatatatgagaaaagaacctttttaatgttaagggagagcatgatctgtgaaattatctgtctttaatttatctttggaaatgaacatttttcaaagttttcattagattgtattcaaaattggtttttattctaaaaaattaccatgttactatttcatatttaaatgcaactaggattagacaagcaacaataataatttttttcttacctgggagcctacatgaatactgagtgtattaagatatcaactgagatatcttgctatcttagtttgaggagaataccatatatttggggaaatagagagaaagtggagtgaacatgtaatttatgtctcttaaaggtgactcaaatgttctttatctgtatcttaaaatctttagtgagcattcttccttatgtttaggctagttttctctctgagataggtaaagtaagctactttgccttagtatgcggatgtatgtgtgtgcacgtactcatgtgcccatcttgtcaatacatggagagatggaataagacgaatgtagtatgtctggggtagaaatttggttgcaggagagaggctgacacattcacaagcagcagcaagggaagagggattactggagtagaggcaagggagaatttatttacttaattacataatacttatttagaatctacagtgttcccggtatattgagttatatatgagaatgcaagaaaatgacatcactagtttaaagatacaatgtcttctgtttttcaaatgtttcgttgattttgttttattcaatactgtttagtacaatattaacagagtaaacaacagtatgagtccttctcatgtttcactttgattgtatcattgatatttaatccaacgtaaaattcctaaccttcaaaaaataattctcacttaatgttccagtggagtttgttcccaccatagtactgctggcctatcacaatgctgtaggtagttgtagacttgttcagtcctgttattggtggtgacttcctcatgtgctgggacctttattattcacagctgaattcccagagcataagagtgccttttttttttttttttttctttttttgagacagaggctcgctccgtcgcccaggctggagtgcagtggcgcgatctcggctcactgcaagctccgcctcccgggttcacgctattctcctgcctcagcctcccgagtagctgggactacaggcgcctgccaccatgcccggctaatttttttattttttatttttttttattttttttttatttttagtagagacggggtttcactgtgttagccaggatggtctcgatctcctgacctcgtgatctgcccgcctcggcctctgaaagtgcgagtgcctgttttttaatgtacaacaaatgtttcttgaagacacggcttttacattagcatattacatgaaagtgtgagggtcattaatatgtgtgaagaccagttaggattttaaagttctgatcagatacgttatcaagctgatagattaaattaactgattaatccaaggaattaacattaacaagcaatgaaatggtcagtatccaagtattgaagttgtatttgggttttacctaatattttccttgatcttactggctactttgttgtctaagctgaagaaaggccttcctgattacctttatttaaataaaataacagtggtgaaggtaatttcaaaaaatattaactatgctaaaacatatacctgtggtttgatatacaagaagctgcagaaggttctcagaaatatgtaaaacaatttattcccaaggtaattgataattgtatgcattcttacagaataagctgttataaaatttcaaactttatctaaaactcaatagcacgtctcataaaatgaactaaatagttctgtcgggcataagaatgtcggcttctagtatagaattccatgtatggtacaaaagttgtagagagattgtgtaattgctacattcatcgtataattttagaaaaatcctcttggtaatttatatggtaaaaattgactgttacaattagaaacataaggcatattttgtctcaatggattttattgagtatgctaaagcaatacacactacatatcgggtaagtgtgtgtactatgaggggagaagtatatggatacacagatcatgatttctatgtaaaatttatatcaggcttgtatgggagaagatacatgacaagttaaaatataaaatgaccacataattaaagtataatttaaattgggattattataatttaaatattttcccaagaatatcttgaatagtaatctttaaaatttttctttttttgatttttttattatacttttagggtacatgtgcataacgtgcaggtttgttacatatgtatacatgtgccatgttggtgtgctgcacccattagctcgtcatttaacattaggtatatctcctaatgctatccctcccccatacccccaccccaccccaccccaccccaccacaggccgtatgcagccataaaaaaggatgagttcatgtcctttgtagggacatggatgaagctggaaaccatcattctcagcaaactatcgcaaggataaaaaaccaaacaccgcatgttctcactcataggtgggaattgaacaatgagaacacatggacacaggaagggggaacatctgtaaaatctaaaaataatttagtttcaaaagataactttaaaaatgtctaaatgctagtggtaaaaattaaatatgtagatgatttattaaacattttaaaaacctcatgaaaaagggaatgtgcgacaaaagactaatttgcagctatcaaaaaataggaacagaaaaaatgtgctagcatattaatataaatattaggtgtcattgtgtgtccgagcaacattgttatcagttcccatctagtaatgactctctgtgtgtgtgcagtaaaatcaataataaaggggatgaataggacgactttcatttgaaactaaatctcttggaattgtgtgagctactgtgccacctatcagtggaatgatgaaataattcatacatgaacaattagcttaaataatcagcttaatttagtcaaatttattacaggcaccagtttacaaaaataattggtgcccaagatatttaatacttgggaataccagaattagagtatatcggagacaaagtgaaatctggatactcaatatgatacgacttttttgtttaaacctgcatatttaaactctcctttggtagttggatgctggctccccaaggatactcatgtcgaaatccctagaacctgtgagtatagtacatgatacatgacacaggggaattaaggttgttaattagctgatcttaaaatagggagggagattaacctggattacctgagtgcacactatgtagtcaccggaatgcttaaaaatgaaagaggcacaagagtaggcctgagtgatataatttgagaaagactatacctactgttgttcgctttgaagaatggaggaagaccaggggttaaggaatattggaggtctataaaagctagaaaagggaaagaaacatgatctcttctagaatttccagaaaggaacaaagccctgctgttgcttgagtttagtctaataagactcatgtcagatgtctaacctactcagctgtaagataaaacatttgtcttgttttaagccattaagattttgggaatatgttacaacagtaattgaatactactgcactctctgtagttttttttctgttcagtttcttagctctggtctgttgtacttggctgttcagctttggggcctgacaaactgccctcaatggtagaagtccagcagtgctcatttctatagggttcgggacttgaatcacaaaaggcacgaagggaaaaactttttccctcaccctagacgaaagtccatattttttttttttttttttgcgaggatctgacattttaaaagatgtttagcagtagaaatccctactgttttcagggaatattatcctctacgcttcttacctggcacagtcatgggacaattacatcaacacacaatactttgtcctatatattctgtattatttttaattaacagcatcaactgacaaatctatgttgaaccatatgaagcccaggtctcacctacagtctcttttccagtaatattcagacatatatcagttttttagaattcttgctgggattgcttcttgtatggttaaatgaatgtgctcatgtgcatgggtatataattatgtgcatgcacacatggacgtgcgcacactgctggacatccaaaattgagcagcgatgtgcacagggcataagaatgtatacttgatacttaaaaggatttctaaaatttttacacagtaactgttgccatccttaagatagctctttccttaagtatgcaaaaacagttgggctgtttcaaatgcttatggaagcatctgaaatttccttgcagaagaatgtctttgttttaaatttacatgtctaaataccaattggaaaggtaaagatttgctcaatagaaaggagtaatctgttaaaagtttaaaaaataccgatttcttttggaaaactgcgaagtcctgaattcagaggtcttattcttgtttattctaatcaccccatctgaaggaagcataactttccccaatgactgaaataataacagtaagaatgagaatacatggaaaatgatattaaattcttaccataaacaatcttaaaatttttgctttgaggttaagttttctgagaaattccatacttgcttaaaatatgtttttacaaagtaataactgccattattatttacaacacattaagtactatcctagttatttcaattgcatcctcccattaatttcctagcttggtaggattccccccccaaccagaaaccaaacttaaaaactaggaacttccagtccagtctgtatccctagatgtaagattctgacctggataaattgataatgctgcgaaacaaagtgacctagaaatccagctaatcttatcagtgctcgtttttaattgagaaaatctaattactcagataattgtggagcgtgttgcatactcttaattactgtaaaaacaaaaaaaaaagacaaatttatgctgctatataggcctcacgccctataaaactggatatacttttttatgacccatttagcttcattcattttatcagtgcatagaatgcagtatgttttccttatttcatactattttgttttactttttgtaaccataaaacatcagctttcatgcacaagcatatttttggttggatgagtttgtttaattaattaagcatttgagaacatcagtggtttagttttgaggtgtcacaaatagaaaaacttagggaaaatttctcattgtattggaaacaatttattctgcattaataagttgatataatttggctctgtgtcccctacccaagtctcatctcaaattgtaatccccacgtgtagagggagggtcctggtgggaggtgattggatcagggaggcggttgtccccatgctcttcttgtgatagtgtgtgaatgctcatgtgatctgatggtttaaaagtatttgacagccttccccccgaccccactgccctgtgaagaaggtacttgcttccccttcaccttccaccatgattgtaagtttcctgggggcctccccacccatgtagaactgtgagtctattaatcctcttttacttataaattacccaaccacaggtactctttataacagtgtgaaaacagactaaaacagaaaattggtgcccagatagtggggcattgctataaatatagcaattatagaagtgactttggaactgggtaactggcagaggttggaacaatttggggggggggtcagaagaagacagaaagatgagggagagtttggaatttcccagagacttgttgaatggctttgaccacaatgttgatagtgatacggacaatgaagtccaggctgagatagtctcagatggagatgaggaacttgttgggaactggagtaaaagtgactcttgctatgctttagcaaagagattggtggcattttgccccttccctagacatctgtggaactttgaacttgagagatgatttagggtatctggcagaaatctgtaagcagcaaggcattcaagatgtgacttgactttttctgaaaacatacggttatatgcgttcacagagagattatctgaaatgggaacttttctttaaaaggaaagcagagcataaaagtttggaaaatttgcagcctgtccatgcggcagaaaagaaaaacccattttctagggagtaagtcaagcctgctgcagaaatttgcataagtaaagagaagcagaatgttagtagccaagacaatggggaaaacgtcttcagggtatgtcagagacctttgtgccagccccttccatcacaggcccagaggcctagaagggaaaaatggtttggtgggccaggcccaaggccccactgctctgtgcagccttgggacctggcttcctgtgtcctagctgcttcagctccagccttggctaaaaggggccaaggtacatcttgcaccattgcttcagagggtgcaagccccaagccttggcagcttccatgtggtgttctgcctacggctgtgcagaaggcaagaaatgaggtttgggaacctctgcctagatgtctagaggatgtatggaaacacctggatgttcaggtagaagtctgctgcaggggcggagtcctcatggagaacctctactagggcaatgcaggggggaaatgtggggttggagcccttccccccaccacagagtcctcactggggcactgcctagtggagccatgagaagaggcccaccatctagaccccagaatggtagatccactgacaacttgcaccatgcacttagaaaagctgcaggcactgtgaaagccatgggggctgtgctctgcagagccacaggcgtggagctgtccaaggtcatgggagcccaccccttgcatcagcctgccctggatatgagacatggagtcaaggcagatttgggagctttaagatttaacgattgcctggctgcatttcaaacttgcgtgggacctgtgtctactttgctttgaccagtttcccccatttagaatggaaacatttacccaatacttatacctgcattgtaccttggaagtaactagcttgcttttggttttacaggcttgtaggcagagagaacttgccttgtctcagatgaaactttggacttggaattttgacttaatgccgaaatgagttaagactttgcgagactgttgggaaggcatgactgtgttttgaaatgtgatgacatgaggcttgggaggggccgggagcagaatgatatggtttggctatgtgtacccacccaaattttgtctcaaattgtaatccccacgtgtcaagggagggaactggtgggatattggatcatttgggggatgggggatgggtggttcccctatgctgcactcatgatagttctcacaagttctgatggtttaagtgtctggctgttccctgccccctcctgccacctagtgaagagagtgcttgcttcccctttgcctttcaccatgattttaactttcctgaggcttccccagccatgcggaactgtgaatcaattaaacctctttctttctaaattacccagtctcaggtattccttatggcagtgtgaaaatggactaatacataagtatactaagtgatagaactacctagaaagaataaatccagattaacttaagatgctcttggaatcagtgtttcagtgtaattgactgtggacttaaacagctttaatggagaagttgcatcttacgaattgtttctttccctccggtcttagtcccattacttgaaagaaggggtacttggtaaatgttgattacgttattaaaaatattttaacttatttttagtaaaattgaataactctcttatattacaatcgtggaacccttgccctttagcaggccatttctcctaaggaatttcagacatccctaatcttaacatctttatataatgtacatactgttgtgcgagtgtatctttctaggggcccatttatcttaaaccgactttcctatgttcctatcatttaatgtgtttttccattggtaatgatatatttcttctgttccaggatgggccagatatcagatatcacacattgcaagtgtaaactaaagcccagagcagaaattcaaatggaattaaagtataaataaaaatataggtcagacagaatatggataggttgtaggaatagatcagatgccagatgtagattttaaaaaacatgttcagaaaatatagtattgaaaactaagaaagagcactccagaggagctttaaaaaaggagagcgagagaaagaaaaataatagaaaataaaactggaggacattgttaagtgaaatcaaccaggcacagagacacaaatattgcaagttctcactcatatgtgggagctaaagtaaattgaactcatggagatagagagtgggatgatggttaccagatgctgagaagggtaagtggggaggacaggataaggagggagtggtaaataggtaaaaaaaaaaaaaaaaataaaaagtatatagttagatagaaggaatcagatctagtgtttggtagcaccctagagtgattatagttaccaataatttatatttcaaaataatagttaaattggaatttagctaacataaatgataaatgcttgaggtgatggatgccctaatttccctgatttatcattacatgttgtattcatgtatcaaaatatcccatgcaccccaaatgtacaactattatgtagtcataataactaaaataattaacgaaaatgaacctcatctaataattggacatttctctcgctagctataaataccaggctttcagtcagctctacttttagtttatgaatgaataccatagaaacacctgtaatgtcctccagtcaaaggtgttgatcacccaaagctgagcttgttaaatttacagggaaagggtaagcaccaccttcagggaatagtcatagcctctcagaagaggagcatgacggaaggatacttaagagttttacacgctgagctggatggttctaagtatgctctcgacagattggtcagaattagcttaccagatgagttgctgtgacagtctgtggtgttatcttggaacacatgagtttgcccgagtttctgtaaatctacttgagcttaaacaatttgatatgtttattttccccaaacgattttatgttagccatcacgggtaattatgcttggcataagggactcttgcttgatataggggggagtctgttgtatccgagttcttagatcatcctatattacatcctatattaactctttaggatacagggattgattagggagtgatatattagttcacttacatagggagaaatgatcaactcagaatatttttgtccctttaaaacgtctacctctatgtaagagtaaagagcataggctcttgagctgcactgtctttgaatcctagctctgctacctaccagatgtgtgaccttaaaaactttacacaagcaattagttcgtcagtttcctcatttgtgcaatgtggttaataataaatgggttaatgtatgttaaatacttcatatagtacagagtaaagactagttattgtaactcatgctattgctgatttttaaatgatgtttattttaattcaattgctgttcccccttgtaaacgtagaaagaaaaggttaggaaagggagatgtagaattctactaacaatgacttatattagtagttgggccaataggccctccaaaggagattcatcttgtgggatgtaagtgcatatagtagaatatgtcatgaattaataacggcattcaaaaatgaagcaaagacctgtttaaatgacctcagggagaaatcagaaacttttacagcagtatctgctttaggaaatagctagtgatttaccatttcaaattatgaatggccaaccaatgccctcatcagttaggcattgacagcccattcttctagttctatcttcttctgtaccggtttcaggtgtttccttctattactccttgaattggctatggcatagtcagagtatcaaaatcactggcttagttaggacctcctagtgctctatataaatatattggtatttttatctttttgacttggaatggtttcatttaacatgtaagatacttagatgttgagcccatccttgagaagaataatgtataaacctcaaagataaaacaaaatcctctcattcttgatcagtgcttttagtttgagcatgtcacttggattactgtgtctctggctctagcattaaaatagtcaacctctgaaatagcaaaagtggtacagaaactcgtatattttggagagtcatcacagggaatactatttagttatatttaaccaattgttgttatgcatctttcaggggtgagacactgaaaatattgcaaagacataatcacagcccttgatataatagtagtttgaaaaaagccgtattggggcacagaaggagtagtggcagagtgtgtgtgtgtgtgtgtgtgtattaacaaaatgggattagggaatttgtcaatgatgagatgacatttatgttttcacttgctgaaaactttagaaatctacttagtttgctaggtttgtagtggcttctgttttcatctgtagtagttacaccttaagtgtgacaaactttcatttacttaatcagtttcagtctttctaaggctggcatgatcactaaatgagaatagactcatcttaattttcacatggcttcaaaattatagaaatattaatccttccaaaaaatgtttagatgtagtccaaaagatttgtctgtggtctctgaaaagtgtttcactggagataaagctaatccagtttaaagtaactttgtaatcaaaattaatattgcatgcgctaatcataggctctccatgccttcacttctagtcagatccaggctcattgggagtcaagtgccagagaggtcctgcctcaggacctttgtacttgctgatcctttaatatggaaatgtgttttctccagagagtcatcacaggattcaactgcttatttcattcaactctatttttaaatgttcctgtagttgaaaggctttccctctctaaatcctctcttaagtagagccaacctctccatgccttttgttccctctctttaccttgctctatttttctttataggacttgccatgacctgattttgtgtagcatatttatttgtccttatttttatttctagtcctagaatttaagcttcataagttaaggactttgtacattttattcactgctatatctcctggtcctaaaacagtaggaacttaaatgtttaatgaaaaacataaatgaatgattaaattactaatagaatctgtattccctctccaaatgtacatttggtattgtactaatgtatataattttatgcaactcataaagtaatcgacatatttatattgctttcaaaattagcgccctcaaatacatttaggttagaaaaactaaaattaatacatcaattgatcatcaagcatagaaaaggaactccaagaacacgtaaacattttacatctaaggtcttactatacttttggtattaatgtatattgtattaaatcattgtaaatgtagttttctattccgaatagcaatactagaggaatttactttaaattctacattctctgctggatgatcccccaaaactgctgcccagataattacagttccctctcttagcttgtcttccagtctctaatttcctcctactttaaatcattgttcacatgccaccacaattagtgtttgaagatgacaggtctaagcatgtcattctcttgttaatacaaccccatgttctttctaaacaaaatccggctttctatgcctgccttttattgcttcccaccatgtgttctgtacccattcttaaactaaccttcagttacaccaaccttgggaatacatgttcctgaaccacaaaagggtttcctccatgtttttatcttacagaagtcacttaccttagtacttcatgcatagtctgtactaagtaagggtttattggtgatgactatgtgttcaatcttttaaaaactttgccactgtcctagaacttaaagatgactattccatgaagctggtttatatttcaaagataaaatgtcatatttattataagcctcctgtttttttttttttctggtttttcctggatagtaatgtttactcaatttactaataaaactagaatatatcacttggctataagctgtagtaccacagaatttgaggtgacacagaaaaattattcatctgctcttatatctttccaagggcatgattagtcttgatggcctggtgcaactgaattctattaattcttatttaaatcatcagaaacaaagtgtgatctcgtgtcactgaattagctaaacaaccttgctgctttaacacataagtgccaaaatagaaaggagcttaaaacaatagtttatatgtagcccaggtataagtccaatgtaggtgttccttattggtgactgatatggtttggctgtgtccccacccaaattgcatcttgaattcccacgtgttctgggagtggcccagtgggaggtaattgaatcatgggggcaggtctttcccgtgctgttttcttgatagtggtaagtctcgtgagatctgatggcttcataagggggagactccttgcacaagttaccttctcgtctgccaccatgtgagacatgcctttcgcattctgccatgattgtgaggccaccccagccacgtggaaccgtaaatgaattaaacgtctttcttttgtaaatcgtccagtctcggcaggtatttatcagcagtgtgaaaatggactaattacagtgactaatatttttctatatttttctgcctttgttgtggctctaccttcttcacagatgatgatgttttttgtttttttgttttttcatatagccattgaagagggggaagcaaatacagaaaagccacagtgacttcttagaagccttgtggtagaggtgatgcatatgtgctcccttcactttccacatgaaggggatgtgtgctcatgaaacatgtatatagccatgcctgtctacaaggataatgcagtggctggctgagtggctgcttctaagtgaaaaatctatactttaaaagctggagaaaggacatggttgtttgacagcctgtctctgccatagttaggaactatcagcttcataaataaaactatctggtggtcttctcaatggggagcttaattacctcaagtcaataagaggaaaatatccattagattcaattctatgttaagaaaatcgtggtcccagtgggattataatttctaaaatgaaggaatgtcagtaaatttaatggaaccttaagtataccatagaaaaaaatgatacattctgacattgaattttgttgatttaaataaatttattgtggtaaccatgctggttcccttcatgacatatgaatggggaattaaataatatacacaatgctttgctgaaaagtgttcaatttgtgttagatcagatacacttgtcttggtgacaaaattggcacaaagctttatgaaacccacgagtgggcaaagattgtatcagaaatatctaacggtataaagcaattttgtttttcattgttacgatattgacacatctccaagaaacacatccagggatgaatagctctattccccaaattctaaagacagcatctgacggaaatctaatttcagtcttgttattaaataagttttcttagtgtctgccatagtagacagtgtttgcaagatagcatattcattttttaacatatttttcttttgtgtgttataaataaaattaataaactgtcatattctactggtatccactgacgtttcttagttttactttaatctcaccattatgtaaattgactttgacagaatatttttagttgaaacattgctggaaattgaataaagttatgtgtgtgtgtaactcctgtgaaacactcaatgttatatctatatctcttatcaatagttaagcctttatgaaaataattgattctttagcatggtgtattgcacctttctcccaaacagagatttacagacacatagtagggtgtgtatatatatagatgagcatcaggtataacacataaatgcttatatatctaattggtgttgaggtctgaattaatgtatttttgaaagcatcggttcttgtgacagtagaatcaaatacttgcataatgttttatagactagttataatccttacaaaaatcctattgacaaaatagcattagcttaatattccagatgagaaaatgggctccaagtaattagatgctttgttcctgatcaaacactaagtggaaaaaaacccacctcattacaaaattttcttgttgaaagacttcagactgcctctaaaatagaggagagaagaaatagtctgacactctaaattggatataaacgtcagaattgggactataagtctagaaaaagtaagtatgtttaatggcacatatagaacttacagtcttaacaaatgaagctttttggtcaattttggagtatgatcttctataacacggaaaatcattttggggttttttttcctgaataattcataaatggagatggactaaagaaaatataaaggaaatagcataggaaaattttgtaaaaacttatttggatattttatgatttttctacatctgttttctaaattttacaccagggttccctttaaatggctacttttttggaaaagaaatctgagtatatacccatatgcaaatgagcctcaaaaaatactaggtgcctttagcttctgttaatatgaaattactaattcatgatgagaatattttattttaatgttagcggtgttgcttttggttggaagccaggtaaatgtaatcctattactatgcctataatgcggagtagttttgtttaatggtatgtattaatgcggcattggacagcttgaattgaatcagagaaatggtgttggcaagcattaaagactttaagagaatgcaaattttatatgcctctttttattgtaaattgacaatatataattgtataaatatatggcatacaaagtgatggtagaatttatgaatacaatgtggagtaattaaatcaagctagttaacatatctatcacctcaaagacttttgtggagagaacatttgaagtgtactctcttagcagcttcgaaatgagcaatactctattaactatattcatgctgtgcaatgcatttcaaattttcatcagaaaaatcagctttgaaagagtgtatgcaaaaattttataagcttctcagatgatatgatcttatatgtagaaaattctagagatttccacacaaaaaacctgctagaactaataaattaagcacaattgcagtaaataaaatcaatatacagaaataagttatattttatgcactaacagtgatgcagtccaaaaaggagattaaggaaacaattttatttaaaatagtaacaaaaagagtaaaatacttaggaattaaccaagaaggtggaagacttatacactgacaactacaaaacaatcctgaaagaaattaaacatttatttttataaataaatgaaaaggaaccccaggtttatgaaatggaacactcaatattgttgttgaggtatccgagttactcaaaacaaactacacattcagtgccatctctaagaaaatcccaattagtttttctgcagaaatagacaactctatcaaaaattcccatgtaatctcatggatccaggaatagttgaaacgatcttgaaaaaagaatgaagttgaagggtcatacgtcctgatttcaaaacttactacaaagctaccataatcaaaacactgtggtattggcttaaaaaaagggaatgtagaacaatagaatataatagccctgaagtaaactctactatatattgtcaaacaattttccataaggttgccaaggttttttaatgattttttaatgaagccacaaatgttgctaagaaactgaatatatacatttaaaataaatgaagttggactcttataaaatacacaaaaattaagtcaaaatggatcaggaagtaaacgtggccaaaagtacagaacttttagaagaaagcgtagacatttggaagaaaacataaacattagattgggcaattaaatatcttggatatgacactaaaagctcaggctacaacagaaaaattaggtaaattgaaatgcatcaacattaaaaacttctgtgcatgaatgaacaccatcagagtgaaaaggcaacttacggaatgggagaagatgtttgcgaatcatatattcaatagggaattaatatccagactgtgccaagaactcctatatgttagtccattcttgcattgctctaaagaaatatctgaaactgggtaaattataaagaaaagaggtttaattggctcacatttctgtaggctgtacaggaagcatgatgctggcatctgctcggcttctggggaggcctcaggaaacataaagcagaaagggaagggtgacctggcaggtcatatggtcagaacaggagcaagaggggtggagggagatgtcatacacttttaaacgaccagatttcataagaactctctatcacgagaatagtaccaagcggacagtactaaaccattcatcagaaatttgccccagtgatccaatcacctcccaccagacaccaactccaacattggggattacaattcaacatgagatttgagtggggacacagttaaattatatcatcgtagaattcaacaacagaaaaacagcaattaaaaaaatgaataaatgagttgatcagaaatttctctaaagtttggccagtaagaccatgagtagataatcgatatcgctgatcattagggaaatgcagataaatcccaaatgagatagcacttcacacccattaggatgatgattattttaaaacaccaaaaaaaaaaaaaaaaacccagaaaataaatatggttgaggatgtggaaaaatttgaacacttgtgaactgctggagggaatgtaaaaccttgcagtcactgtggaaacaaatatgttggtttctcaaaatatagaacgtagaattaccatgtgatccagcaattccacttctgggaatatactcaaaagaattgaaaaaaggaccttcaaaatatatttgtacacccatgtttatagcagcattattcatagtagcaaaagatggagcaactcaaatgtccatctgaagatgaatggataaacaaaatgtggtaaatgtatacagtagaatattattcagccttaagaaagttctgacacacattatagcatggatgaatcttgatgatgatatgctaaggggaaaaagccagatacaaaaggataacatatgattctatttgtatgagctatctagagcagtaaaatgcatagataaagtagaatggtggcctctagaagctgggggagagaaggtatggggagttatttaatggatatgaagttttttgggggaagataatttttggaggtggatggtggggatggtgacacaacaaggtaaatatacttaatgctgataaattgtatgcttataaatgattagaattatatgttttatgttatatatattttaccatgataaaaacctataagctttcttgtaaagttttagaaaatgtttggattcataagtgttggatgattgagttttatagtgtaaatttaatgtagttgtgctcaattgtcaattgtatgcctattgtctgtgagtatatattttccagattgttctctaaacataatttttaaccatttagttggaaaaaaaaaaaacctcaacttaaacccaaatggaattatgtagtccattcagtgcatactgtgaaatatattagtaacattttattcattttaaagattttcgttatcagtttaggaagaatgataattttataaatccatagcatactgttgttgtgtgcgggtaatactcattatttaggctgtttttaatttggggtcttttttaacagataatcaacaaacgttttttatttgcacacagtactcttagtatttcgttttgcttcagtaatagtaaatgaggctggggtttggagagcacgattgcttttggaaaagtcaatagagacatgtttttatcgctactgctttttttctatgttaattggaatttgacgtaaaattgattctgaaagatatcaaggtagacacttgaaatatagattggacaataaggttggtagaccattactgtgctttgaactagagtcattaatgtgattgtgaaaatttttactttgtatgttattcatcacttttctcccttagtggtgtttagagcatgatgagttgttactgtactgacaagtattagtctagtagtaatttctcataggctgacaagtgccaaaattcatcctcacatatgaatacactaaagcagacaaacactgttttcatctctgacactatctacagtttatcgtgatacattattttggcctacagggtcacaggcaaattatatttaatcactgctttaaactaaaacataactataaatatttttgcactctttaaatcagcataacaatccaatagacttcaagatcctgagataatatttaataacattaaaatgatttaaaagtataacgattgtattaaataattctgaataaacaatacttttgaatgaagaagattaattagcatgatcattatagaaatggtcctattaatacaaagatgtcaagagtcatttctggttcaagtcaattaagctacgttttaattgaaaaaagctgttcattgtgtacagcggtagcactcctgacatatcatataaatgaccccattaatgcaggagaaataaggtcaactgagacatttttactgaaaccaattatgttacattttaattgaaaaataaaagctgcttttattcaaaggaagcaccactgacactccatcatattccatagcctcctaatattgcagtaacttcctaagcagtctctcagttcttcgcattatacaaagttatctttttactacattaattaggtcatgtgttccctatttaacaccttctgaagactctacattgtacttagaaaaatgtctggagtctgaaagcagccagcaagaccctgtgtgatctgtcccctgcttgcttcttgatctcacttcacactggttcccttacttcaccaggctccggtcaagcaagaacatacttcttctccctctttatatagctgacaacttcctgccattcagtctgagccgaaaggtctcatcttcagaagaatcctttgcagtctaccatatgtaaaagagctctcctgatgagccctcccagccattcctgtatcctattcacacttcttgctttaaaatcatcatcattatctgaaattaccttgtttgattatctagcttatttcttctctgcttcccctactagaatgtttggtgtcaaggactttgtccgttggcttcagtactgtatagccagtagctaggagaatgccgaagagatggtaggtgaaaaatgtttgtggaatggataaataaatgaatagcaatagtacagaagtatgccatcttatttgttaataggtgaccatcggttgatagagtttcatttctcctgattgcttaactcagtaacactctcctgcaggagagctagtcaggactcagggtttttttgttttttttgattttttttttctttttttttctttttttgagacagagtcttgctctgtcacctagactggagtgcagtggtacgatctggcctcactgcaacctctgcctcctaggttcaaatgattcctcctgtctcagcctcccgagtagctgggattacaggcgcgtgcaactatgcctggctaattttttgtgtttttagtagagactgggtttcactgtgttagccagaatggtctcgatctccttaccttgtgatctgcccatctcggcctcccaaagtgctgggataacaagcatgagccaccatgcccagcccgaggactcaggtttaagtatgtgaacagatagttcagaagacgttataaactgttaatggaaagtctggaaggaacccagagatatgttttgtttgatctacaccttactacagatttgggtttctgttagcagatctagcagctctggggcaacattctgcaatggcaccatcctggtagtactgaggagtgctactctcctccctcaaagcgggcacattactgttcagtctggagctgcactcgccatacacacagtttatgtaactccactgacagactctgccactccagtcatttatggcatctgactttgattccacatggaaatctactgggtggacctgtcacatttaaagataatcatcatcatcattgtgtatgtgtgtgtataagttacattggccatttttctggggactgagtctgtctactccaaaagctgtgaaaatagtaatgattaaaagtcctcagactctatgattgtggaaattctttgtattctagaagcacacaattctaagacttctgagtgtctctcttcagtctcctgtgaagagcatcaccgatttatcactaaatgagcagattatatactggggatttagtgtagaatgtgccatacagtagctgtgcttcttgaagaaatccctggataggccaggtgggtttatggtaagagataaaattaaatagacgctgcaaaaaaaggagacaacattattaaagtcacaggaacaaatgacacttgtaaacatcttggacatgagttgataacatttaagtgtagtccaaagagttcaaataaaaaggcattgcaatcacttgagagagagagagaaataatgcccggagagtacatttgggctatattttagagaaaggccttgataggtagaaatagggaagaatagcattccaggtgaaatagcaaggcaaaagcaccaatgaagaagaaataagaggaaggcatattcaaggtatagaaaatcatgtcattatgtgaggtacaaaaagctatcgagtgtgcatttatatatgaggtatcatgctaggaacccaggatagctagatcaaaaggtatgcattaaagacattttgactaatttccaaatgatcataatgatgcctatatgcaacatcaatatatgaagtattcagtttcccattccttgcaagtaaacctgaatatgtttaacattatatcactctgttcttccctcctgcaaccataattcataagttattttcaccaattcattcaccaagcatttattgaacactatgtatcatgtctctgattggcactggggaaacaaatgtctctaatctcaagggacatacagtagaatgggagagagatacagttcctttaaattctggacctttccatttctcttctattttcaatagagcttgcagtcatggaaaatttattctctgtggcaacaaagtagggcagatatttgccctggaaggtgaagagagatagagaaggctttctgcctaacatttatcatgaggtactaacaaatatgacaattgaataatgctgttaaatactatgtggcatactgattccatttcacatacttatgtctcctctttttaatagaaggtagtgtaaaaagaagtcctgtgttacagtaatgtttcttttattatctaattgatccttgggtacgttacctaataattgggtatgtacatctccacatacatagcagtggaatagtaatagttggggggatttttgtgacatttaagaagaataattacaagagtcaaaagtataatataaacacaaaataggaactttccatttttcaatgcagatttattcagcatctttgcttctgattccatgtatttttctgcttcagaattctttttttatcctctatcttattttacagttaataatttcctgagggactactttctgagtggaaaattgttagaatcctgaagaaatgtatcacatgggcctgcctgggtcttcccccgccccccccccccccccaagaaaaacctgcatctgccttaaacataagatccagtagtcagtatgaaattcatcaagctaaagcttatctcgtctgtagttgtagctctctgaaactttaaaaaaggagttttaaactttgcatatctgaatttctgaggtagcattatatatgaaaccaaaaatatataaaataataagaaaattgctaaagaatcactttgtgaaatgatgaatccatttagcttagttcttctgtttggatatgatagccttattgccatagagaaattgaggtaaggcattaagagaacaagcaaacaattttgcagtaactaactcatctctcccatgttgccaggtgtgccgcatattgctgagcagtgaaaggattaagctaggaaagaaagtggggaaagtgctacctggaaatcagaatgaacattgaatatagaaatgcatctaagggggaatgagaaagagaagagtaaattaggtttttcttgagtcctgtctttgttacttccacattttgtctacaggattaagcattcagtgcctgataagtttagtattgtgccagaggaccccagagaaaaattagaaatgatcctttccttctagcaactttcagtgtaacttgagagtcaggactgaccaaaatagttcaataggtctgaagtaaaattatttgtgaagtagtaaatttcactttatagtgtatgaatgctgtagaaatatatgagagaaatcaacaagggctgtgatggaaaataggaaacatccagaagtagaagttgagctgaaacttaaagatagttagaattggataagataaaatgagtattcccagttgcaaaacaatgtgagagcatgtttcgaaatagagaagagggatgggcataggaaaaacatacagatgaagtaaaagagggcattttatcttttttatttttttcattttacatgtctgttttgtttgtggacgcctatttggtctcattgttctggctttgggagacaggcaggggatgctgcggagcacatggcccctatttgtggtcgttttgctccaggtgaaaataatagccaccctttattgaacacatcctgtgtttcaggcactgtgctaagctcttacactttgttatctcgtaatcttgagaatacctgtgtgagggcaaattgcagtaagagtaaatggggggtttgattccgaagtctgagattcttgcctttatgaccactgacagttaaggggcttgttacataattacaggaactcaagagtcttggtcgttgaataacaatggatcaagtgctgtgctgtgacccattattttatcaagtggatggaataaaacatgactactgtgttcatttggatgagtaggagaatgctgaactttgaaaggttatggaaggcaagcctgtagagaggtaccaaaatggcatgtagcaacacgcagggaggagaaagacctggatttaaatgcagtctctgccatctagagctgcgtgagcttgagaagtctgcatcatcttccctctctggcccctaaagctaaagaattaaaatgtatcaccactgctctctaagagttcagtttaagtgacagcaatagtcaagagtgtcagtttgagttttcccccaaagcaaagcctgacagaaagccatgattggctgattatcaaagaaactagtaagaaaactcaggaacatgtgggacctggaaaagtgagacaaggaagaaggaaaagctaataaagataacattgttgaactgatgaccataataggtaactgtacctcaaccttgcctgggacattatagaaccttatagaactgtcctcagaaatgtccctttgaaggacaatttattttcctccctcctcttcctcctcctcctcctgttgctagagctaggaagtgaaagggtgttaaccctctaacagcagaaacaggaactgcagcaaaaatgagagatgggttgatgggatacagtgcaaaatacaaagaggcatctactgttcaaaataaacctataaaggaatctgtattagtctgttctcatgctgctaataaaggcgtaccaaagactaggtaatttataaaggaaaggtttaattgactcatagttctacatggctggggaggcctcacaatcatggtggagggcaaatgagcagcaaagtcacatcttccatggagacaggcaagaagagaaagcatgttccgggaaactttcttgtataaaaccatcagatctcgtgagacgtattcactatcacgagaacagcatgggaaagacctgccgccatgattcagttacctcctaccaggtccctcccatgacatggtgggaattacgggagctacaattcaagatttgggggaagaaacaaccaaaccatatcagaatcgaaagaaaaattataaagtcaaagtagaggaaattctggagagccttgaaagttgggctaaaactagatagaatgtgtatgtctcaacattttctattatatccctgaatcatataacttgttaagaatggggttacacaaaatttcagttaggttggagagggaaattcaagagaactgttgggtgtatataacaagactatagttaatagcaatgtattgtatgcttgaaaatttcaaaaagaatagactttaaatgttctcacaagcatgtgaggtaatggatatatcaattggcttgattgagccatttttaaatgtatatgcctatcaagatatattgtatactataaatatataaaatttgtcatgttaagtaaattcgaaattagaaaaaaaatggagctaatctctttaagagttaaaccctgaattgtagggaatttcttgctgacgaagactaatttggtcttgaagagaatttcatgtcaccatgaacttatggcctgacttcaaaccagtgatgagctgtggagggatatagggcactttgctttccatcagatcctctcttaagctgttttgcatcacttaattctaactgtaaagttgggaaaatgtagatggggcaagtgacagcatatggtttgatatatacttgattgtatccataagaacatcctcttacctttttaataagtagcttggagtgcttcctgccaaggctttcaccagttatccagaagattaaaggctgaagtagtgattgtccttggaatgtccctctatctatgtgtagatctgtggttttattcatttgtttcccaaattgatccacaaggagattaatcttgtatttttttcctgatgacttttataaactagatgcgtaagacatataatattgacatcatatcaagttgcccatagggttatttaaatatttgaagagatgtgtttgttctcttacactctctgaatgcttttggtttttagcgattttattgtcatcaaaaaccatattcgactacacatttttctgacctactagacattcacatttagctttgggtactttgtcattgtagaagcaagtataaagtaatgaaatttatgattcaatcagaaaacaagtattgaagctgctgaaatatgacgttctcagctttatttcttctacgaaaagtccaggttaatgtttataaaatatttttaaacttttttgtctgttcaggactgaatttcttgttgagccggaatggtgagataattctttcttctgtggaacaaatgcattttaatgatagttacttatatgaaaatgttactaagatttaatttatgcgcttaatgctgcttaaaataaatgtattcaataacaaaacaaagccaatagccatagcacattaattattgaatagactttctgtagttactgcaactgaatgacaggtagtaagaccttaatatttgcaatcacaattgtattcttctttgccctagattaagcttgctgattacagtgcaatgaagaaaaattaattagtttgctccagtggagcagttaatatagcacaagcgaaacccataccctgcttcctcctgtaaccaacttgttttcacttactctgccttttgatacacaaccattttcttgatcacttcccaattgaggaaaagtttaattaagtagctaatactatttagaaaatatagtgctaaggaaaaaacatgttattaaattcaaaccattgatatttttattgctatttaacttatattttatacctggcaagcaaataattgaatattgtttgaaaatatttgtaattaagaactcaagaatatgaaaacatcattgagttataaaacatgtattactcctcaaagagcaaatattcctgtgttgggctgctcttagttggagtaaacacattacctgcccacagggaacttttcatctattagaattcagaatacatttcagggattcttaccaaaaagatttagaatacagctatatgaatttatagaaatattttaacttcagaaggattgtgtgctcacttccgtatcttcctttaagattttagtcatgttccgttttttgtgttttttttccttgtctgaagacaatatttttagaggagagaatttctttgaaattgatactgtaagtaaatttactgtatttacttagaactactcattcacccatacaaaaaaaaagttgagctttcattattgagctctcctcattatgttataaaggaaaaagacattgtccttatcatgggagacaagcagatacatgggcaattcttcagcaatgtgatgagtagggaaagacatacatgatgtgggaaatagtgttttacagtcaggtcatgcattgaaccaaaactcaggccgtaaggaaaggctttgaaggggcagtggtaacttacctgacatgtaaaggagccagatgaaaaggatgttgcaggcagagaagctgtaatgtacagagaactgaaggtaaaataaaatatcagcttatggcttggcaaacactatggggaaagaggcacagaagtcacaatgatagtgggagccatctgcacaatgatttaatggctagggtgttatgtacagttatgtgtcttgtatattgcatcatttctataacagtataaatgctattgagtataaattagatatttattgacctcatattttacagatttgccgtgaaaatttctgtatgtttaaatctgcgataagtttgttattgactcattcatctaaattaatagcttgttcttcagaaaagaagttttgagactggttgtgatggtctcatcaggttgaagagatcatacttttactgtggcacctattttttttttttaatggtttatttctatttgagtaaaacagtggctaaggttctatggtatcgggataagatggtgataagtgatctatatgacagagttggcagaggaattaataaccatattgacttgggagagtgagctctgtatatagaatacacattttagtcaggagggcagagtggtaaaagtctgagatcttgagatgcactgcttgggtttgaatcctagctgtattacttaaaagctgtgtggccctcagaaagttagtcatactgtgtttcagtttcctcatctgtaaaatggcgataattgtatccatctgataagattgttttgaaaatatttaagtttaacatgtatgtatgtagttacatacatgtaaaagtatttaaaaaggtgcttggtagatattaagtgaccagcaactctaaatattgttttattataattagtaagctaccacaggttctgtgctgctgaataattgatcaataccttacataacatcagcaaaggggtaattttcaattttgcagatggcacaaatctgggtggggggtcaaaatgaagatgagaatttttcatgataggctaaatcacggggtcaaaacccacaaaatagaattgagcagggtttggtaccttcttaattgcttgcttgctttattttcaatggcttgttatgtaacaccaaccatgtggtcaacttgctaggttatataaaggtgaataaggctcggttccttccctcaagaacatattaacatgtagacgcaagtacagaaagggagaactaacattgtattataaatattctaaaaatgctaaattaacagaaatatgatacaaagtatagtataatgtagtatttagaggagataatggtttcacactcctttgctctgacaaagcatcaagagtctttagttatttgtgtcagattttaagaaagccaattaaatgttatagaacacccacagctgagggaagaatttgtactgaagcttggttggagtatactccctgtgtggcttactatgagtggcagtgcagagggtttgtggtggtcaaataggaaatctttatgagtatgaaaaacaaatttctaaggtagactcaatgcaaagtcgaaccacatctggaagaactataaattccataaatgttcattaagcacctcctatgggcaaagtgttctgttaggcctgaatgaatttattgaagacataagaaaaggctcatgtcttggaatatattgtcttttgaggaataccagcataattatgattgtataatagtttaattttatttttgatgtgtactatttaaaattcagagtgctataaaaatagtaaatcagggaatctgtatctggaggaataagaaatgaagtctttttgaaggaagtgatatttagatggaagtctgggtactagcttgttgtggagaaggaagagggtaaaggcatgagggaggaaaatacaggtggggatggaaaggtgttctaagcagggagaagtcagtgcttgtgtattagtccgttttcatgctgctgataaagagatacctgagattgggtaatttatacagcaaaaagggtttaatagacttgcaattctatgtggatggggaagcctcacaatcatggtggaaggcaaggaggagtaagtcacattttacaggaatgacagagggcaaagaaagcttgtgcagggaaactccacttacaaagccatcagatctcgtgagactttcactaccacaagaacagcatgggaaagacctgtccccatgattcaattacctcccacagggatcctctgacaacatgtgggaattcaagatgagatttgggtggggactcagccaaaccatatcattccacccccggcccctcccaaatctcatatcctcacatttgaaaaccaatcttgccttcccaacagtgcaccaaagtctttactcattccctcattaactcaaaactccacagtccaaagtgtcatcctagataaggcaatttccttctgcctgtgagcctataaaatcaaaagcagattagttacttcctagatacagtggggttacaggcattgggtaaatatagcccttccaaataggagaaattgtccaaaacaaaggggcttcagggcacatgcaagtctgaaatccagcagggctgtcaaatcttaaagctccaaaatgatctcctttgactgcgtatctcacatccaggtcatgctgatgcaagagaggggttcacgtggtcttgggccactctgcccctgcggcttttcagggtacagcctccctcctggatgctttcatgagctggcattgattgtggctttcctcggtgtgtgttgcaagctgccagtggatctaccattctggggtctggaggacagtggccctcttttcatggctctaatagacagtgctctagtagggtctctgtgtgagggctctaaccccacatttttcttttgcactgccctagcagaggttctccatgagggccctgcccctacagcaaacttctacctgggcatccaggtttttccatacatcctctgaaatctaggcagaggttcccaaaccgcagttcttgacttctgtgcacctgcgggctcaacacgacgtggaagctgccaaggcttgggcttccgccctctgaagtaacagcccaagctgtacctcggccccttttagtcacagctggagtggctgggacacagggcaccaagtctctaggctgcacaccacagagggaccctgggcctagcccacaaaaccattttttcctcctaaactccagacatgtgatgggaggggctgccacaaaggtctctgacgtgccctggagacatttttctcattgtcttggtgattaacattcagttccttgttacttatacaaatttctgcagtgggcgtgaatttcttctcagaaagtgtgattttcttttttatcacattgtcaggctgtaatttttccaaacttttatgctctgtttcccttttaaaactgaatgccttaacaggacccaagtcacctcacgaatgctttgctgcttagaagtttctcccaccagataacgctaaatcacccctctcaagctcaaagttccctataactctagggcaggagcaaaatgctcccagtctctttgctaaaatataatgagtcacttttgttcgggctcccaacaagttgctcatctctatctgagaccatctcagcttggatttcattctctacatcattatcagcatcttggtcaaagctattcaagtctctaggaagtcccaaactttcccacattttcctgtcttctgagctctcaaactgttgcaacctctgcctgttacccagttccaaagttgcttccacattttcacgtgtcttttcagcagcaccccactctactggtaccaattcactgtattaatttgtttttatactgctgataaagtcatgccagagaatggataatttatacaggaaaaagagtttaatggacttagagttccacgtagctagggaagcttcacaatcatgctggaaggcaaggaagagcaagtcacgtcttacatggatggcagcagacagagagcttgtgtggggaaactcccccttacaaagccatcagattttgtgaaacttattcactatcatgagaacagcacgggaaatacctgaccccatgatccagttacctcccactgggtccttcctacaacatgtgggaattcatgatgatatttgggtgagggcacagccaaaccatatcagtaggtataagtaaaataggtgaagggtggagatcaatcagaggaaagcacaccaaataggaggacaagttctcaatccactgcaaggatttgatttgtagtttggctttcaggcctttaactgtcttcagcttggaagtggggtttcactgggtacccacccctatctgcctaggagtttggctctgcttcctgtcactgtcatatgcacttctctgtggtttccaaaacctgacacagggaagaaatacaatacaggtatctgatttatagcaatctgttataaattattgaatgaatatcatattttaaattcatacctgatagatattttgcacatttcttgatttacttctaaaataagtggatttctcttctttccaaatgtaaatcaaatttcgcctaacttcatatgaaacacgggaagtttttctcccttttgtcagaatttttaaatgtatttatattttaatctgaagaaactagctttctcaaggatggatagagtttgaaaatgatagacatgattcagttttctaactctaatgctatgctagttttcatagagtttatgattaacataaatgtagcaatatacatgattttccgttagggaaaaatctctgtttattcttaatgttgtaaatcacaagtcaataaacacttatgagtgtcttctatatatgtagaaatgtactaggtttcatgggtaaaagtgacaaataaggcaaggcgtctgttttttcatccaatggaaatggctcacaatcacatttcaaaaaagatcagtgaactgtatataactacctatgtcttaatatgaacaaattgtgattcattggttcatataacagctgcaattcctaatacctaacatcaaatcttttttgctatgtgtggtgttagccacataaattctcactattgattcaataatgagttttttggcttttaattgtgtgtcatttttttgttgtttacagacatgataattttacgtagttctgccttggtgtctacctcaattatcagagtcttaaagagattatagcaactgggaaccctaaaagccttcagcaaatcttggctttagccaggatcctcaaataatgtccaaacgtgttaagaacttgaaatattgaacatttccacttcatttccattcattctttccatttccttaggaaaattctaataagaaatgtaattcttaggagcagagagcaggggaagaaaacaggataatttataaactgtttaataaccttgtgagcaattgaatgttgaccatataaattctggataatatcattattgtactcaggttggctgttaaaaagtcataaaggaaagaattttaggcatctatttctagataactattaaaatggtgatcttatcattgcataccatttagctggggagacagaattgtatttaatgaaatgactcatttgttgtattggattcctgccaaattatttcatggtttgtcaaatgataatttcacaagtgtcagtgacaagatgttggacattagttttctcttttcctatctgctgagtcacagttctcaagggatggatattatagtgattcaatcacaccttagattttggcttacatttactaatcagtctagtaaatttggtaggggggaaatcgtgccatagcatataaaataatgagttccatttcctccccacattggcttctattttttgggttctgtatgtacctaggacctaatggggcacttgccacgtaggtccccaatgggagaaaaggttctgttaattactccatcacattaaacagtccagttagtacccatagaggtgaggaagaatgtgcttatgttttatgcttcaggcaaagtagctaatcagagagctgtgaacaattgtaaggaagtgacttgctgcctggttctctgcaatgactgatgacacagtctttttacatcacagaatgtgtaaaatttgttcacatgtataagctcttgttactttgagagggcaattctgggataatttggttgccatattatacttagtcaatccctatgtattgataatctgttttaatttgcatgttgatatacttactgacttacctaataccatcatttatggtttgagatatcattcttaatttccctttaataatacatgtaatgcatgggtttacctagccctaagactcatttcaaaatatattttctgaagttctgtagatgtaattattaaaatcacaaactttcaaactggactcataccccagctggctatggtacttaatgaaaattaaactttttgctcctcagttttcttatctgtataacaggattaaatgccccaccctcgcagttttccttttttctttttcttttcttttcttttcttttttttttttttgagacggagtcttgttctgtcacccagtctggagagtgcagtggcatgatcttggctcactgctaccgctgcctcccgggttcaagcaattctcctgcctcagcctccccgagtagctgggactacaggcatccgcaaccacacctggctaattcgtgtatttttagtagaaacggggttttgccatgttggccaggctggtctcgtacttctgtcctcaggtgatctgcctgcctcagcctcccaaagtgctgggattacaggtgtaagccaccacacctggcctacactttttctttaaggataaaagggaaatacgtgtattaccattgtgcttgtcatatagtaagtaccaaataaagagtagcttctaccattattaaaagctatcctggcttttttactattattaaaagttattcaaagcctacatatagaaggcatagctatatgcctttgtgtcacatgaatagtcaacttttctaattttttctgtggctgtgctttgctctcaaagtgtggcctgcatcagagtcatcagggaaggtggtggttaaaacggattcctccccggcatgttggctcacacctgtagtcccagcactttgggaggccaaggcaggcagatcccttcagcccaggagttccagacaagactgagaaacacagcaaaaaatacttaaaaaaaaaattagcgaggtgtggtagtgcaaacctgtagtcctaactattcgggacgctgaggcgggaggatcaggattgcttaaacacaggagtttgatgctacagtgagtgcatgatcatgccactgcactcgagcctggacaacagagtgagatcttgtttcaaatacagtaagtaagtaaataaataaacccagcaaaacacagatccctaggtctcactctcacgcttgattgagtatgtctaaggatgtgggcaagattctgcagccacaactgtctcccaggtgaggctgatggtactcgttctccaactaaagtttgagtagctttgccctggagtagctgtcccaaacaggttaatcctcagaattgcctgggaagatttaaaatatatttcccaaacataactgaatcaaaatttgaggagacattgtaaaaaatccatttgaaaattgttgcgcaaattagaggttctcaaacttgagtgcacatcagaattttctggaggccttgttaaaacagattgttgagatacggaatcaacctaagtgtccattaacagataaatgaatttaaaaatatggcatataaacacaatggaatattattcagccataaaaagaatgaaatcctgtaattggtggtaacatggatgagcctggatactgttaagtgaaataagtcgggcacgaagagataaatatcacaagttttcatatgttagagctaaaaagtttgatttcatagaagcaggcagtagaatagtggttagcagaagccggggagggtaagagggaggagagggaggaaagggacaagctagttaacagatacaaaatgataagctaaataggacggatatgtactagtgttctaaagcactgtaaggtaacttcagttaacagtaatttattgtgcatgtttaaatagctagaagagaggattttgaaacttcccaacacaaagaaatgacaaatatttgaggtaatggatatgataattagcctgatttgattattacatgttatattcatataggaaaatatcactctgtacctcctaaatatgcataattatgtgtcgattaaacattaaaaagaaaacacagatttctgggtctcactccctgagatactaaccaagtaagtctgggagagtcctgaaattcggtatttctaaaaaggtcccaggtgacgctgatgctggtctggatccacactttgagaaccatagcctgccctagaccactgcttcttaactcattttaaaattaaggatctgtgtgagattctgctggatggtgtagattttcttgaaaaataaaaaacgtgaacatagtttccatatactttccagtgttcatggatcccttgaagtatgtctatgattcttgtatgaaagcttgactccagatagaacgtctttgagtaacatatcccaggttaggaatggaattctctggggctatttgcaaatctgtctaaacatgggaatatgccagtaacattttactccattacccagagaacaggaccaagtcatgttattacctgtagaatgataagagactttcaattctaagaattatggcttatttttacaacttgttggaatatgatttgcagatttggtgaaaatggtagttacttccacaaagatgtttaacaatttaaaagttctagaagtttgtgtttcctactggctttattctttatttttactcttcaaatctagctgttcgctgtctttttcctgaaacatttttattaaggaaaatacagaattttgcagcttatcagtttaaacagaaaacatccctgaaaagtcttcgactatatgactacattacttatacaaatcgtgatcatagtgaaactgaattactttgtaaataaccatgattcattactataagcagggttttgaaattatgactacctcgagaaaacttttattaagaataaaaaagcaactatctcagctggaccaataatagaaacaccagtatattcactcgctttttatttctcaaagcacatttgtggcttgtagccaagaattcattgcattgaaggagtgtttgacaagcagtattgaagctgtaaacactttgaactcattacagtgtctcaccataggaacttaactgtcactgaagacaccctgtctgtgaaaccatcattcctacaattatttttacctttgcctgaaaatatgcttttgtgctttaaggtatttcaaaagacaagagaaagatggaagctaaggaggctatagggatttcctgagttctgtgagtgctgtgttgatacagaacaagatcagaaacttggatatatatgtttcaacttaaaatgctgattgatcatcatgacaatagttttatagagcatttgtatgggggtgaatgtttgaagttataaaaagcattgtaatgttactcattcatgggctgaacaaacatttcctctttctctttctctggctttcttgccaattacttttttcttgccaattacttttttcttgccaaaaacaactgagatcacccccttaagtccattttgaaacaaacttagcaaggagtggttgttagtctgcaataacaatctacatctcaaactcacatccttacagttgttgtgtaggtatcatagctgcgtgaaacagtgaagtgtaagattgtgtctacagtggtctggaaaatttgactcataatcacatgtagaatacagtcctttaagaactctcccaccccgcatcactgccctgaagataatgagccaatgatcctgatggtaatctcttctaaaatcatacgtatttgagaaaaattgtatcttttcggagactggtaatagtccagatgaaaagtgtttatatcctgaacctagagtattgacaaagcagatgaagaggattgattgggatggagaagattcattgatgggacttaaggaatgactagatatgacaggatagggaggtgaagtatgctaggatgatctgtatgataatgtcttacacaagtgaacagaagtccagtttaaataacgaggtttggagggagggagtaaagaagatggatttcatttttcttaggtctaatttaatgtgcttttggtaaaatgtctactaggccaccatgtatatgaatctgaaccttaaaaaggaggtttgagcagataggtgcacagtttttaatcattagcatatttaacagttgaaaccatgagagaatatgccttatgagaagaagacaccaagatcacacaatgctaggaagaccaaaaaggttgtggcagagaggtgggagggttgatcatgagaggaataattaagtactaaattccactgaaaacattaagtaagatgtgggttaaaatagtttattagatttggcaaattggaagttttgataatattcaaaagagcaactttggaggaatggcaaaaaaaaaaaaaattgtaagaatggttatccttcctagaagatggttgcagaaatgattcagaaatagcttgtaagtagagggtaactgaaaagccctgagtgtgcttactagctggtgagagagggtttaaagatgaatatgtgttccttaaatccattttgtgtgtttatgaggacagggtaaatagtctagctaaatcaccacaccctgccctgtgcctagcatagtttctatatatttattaggcaccaaatattttaggtatatatttttttatgtaaaatatatagggaactgtgtgaggccctggaagaaacacaatgtctattttcattgaaaaagagctacattggagagactaaccacccatcactcaatactattttatttagttgtataagtaatgggtgctatggcagtttatgacagacagacctgcccttatcttgggggaaccacagaatgctttacagaggaagccatttttaatgttctactgagagcaaaatagaacttcctcccattcctcacccactgaacacattccacagagttaaaaactctgctttccttccacggtcacttttcttggcattcagaaattattggaaactgtaactatgggttcagtgccaacaacattctaacactcatggttagaatcctaaccagaaagagtacaaataagggtcctttcttttttgattttggctcagatatcgatgttactaataatgataataaaataatagtttaaatttaccctgtctttatgattttcagaatacttcccccttctagtttatttgggatgagatgctagggaatatgagtaggaaaatgataaagtgagacaaagaaggaaggaaagtcaatgaagactacatttcaagagtttaaactgtggtggacaactggcgctcaatttgactggggacttgaagaaaattatgtggaacacacacctcagacttatcctttgaagagatgagaatgctaaggtatttatacaccaactcctgctggtcatctgttggcagatcccgggaggggctgtgcattcactccctagcatttttgatctattgcatgcactccggaagaacagactccagtaggcaaagagatgcaggagctggcaggtggaagttggaacaatgtccactgaaatgcgaaggactcagaggaagagacagggtatcatcagcaccagcctaatggggtttgaatctccattttgccatttactagcagtgtgatctctggcaacttacttatcctctcttggccttcgtttcttcatctgtaaaatggggatcataatagtatctacatcgtaggattgcagtgaggattaaataaattattcatgtaacaattttacagaagagaacatgaaaatttcgaaaagattacttacttgtcaaatatcacacatatgggaagcaggccaaagccttgattcttggccccagcctttttccttatacctactgcccaatgtctgtgttgccttgtatcttcataatttacttcccattttctcattgcttaggtctcattcctgattcttttgtcccatttactctcctctaaacccttgtgattgtccagatgagctttagcttgggtgtctgtgtatcccttctgaatatttcatgcttcggccttgcccagcagcttaaacttacactattaactcccggtcttctctacctcgcatttttcctcttacctatgaggcatcttgacctataatattttcacttccaccagctgagtctatctgtggcacatgattacttgtctgattccttgttctcatggaatccttaggcttctctgatgtattttatcctattggcattcacatcccagtgggcacgaagaatatttaataaaaacattggctttattttagaacggaataaacacatcattctttcctcctaaaaataaaagacatattagttggattgtgtcattactgtagagtgatacaagccagaagatgcagtgacaatatcagaatggtgtgttatctgttaccaaagggaatgggtggtagctgtgtaaccaggtcatcatagtggcatgaccatagccaagtgtacggcaccatagtcaagggcactgaacaggtcattagttgggattgagtcaagagttggaccatttgacatggaacacacattctaaaaatatattaagttggtgcaaaagtaatcacggtttttgccattactttcaatggcaagaaaatgcaattactgttgcaccaatctaatagtaacataaacatcaagcggcttcaacttttgcctaacaagtttatttaaaaggttctaggctagtcatgtttaaaatggaacagctttattgagatataatttatatgccatacaatcatctgtttaaagtatacaactcaatgtttttagtatattcacaggactatgcaaccaaatattgtgttggtattataccaattagagatatgacaaaagctttggaccctctcatgcacatttgtacaaacacaaaagaatttgcatatgataccagaaaattcatggacttctctgaagtccatttatatgcccagaagtactactcgttcagccaaactctatcttaaggcagctattaattctgtttgtacaatccagcagacagataaggttgttgatcgtcttatggactcatggatatcaccttaacgacaacaatatatgtgccaagtctggctcctaaagttttaggattttgtgtttaaaaagggggagaaaagctttagtatgtttcgaatcctaactgacagtgagtgacaaaggtttgaaaaaatatattgcagatgtgtgaacatctggaggctaattgtacatgtttaggtactccataatctcatgaaaacttttgacctagaaatgtcagcgctgttgccctctcaaagagtcatgattctttatcacatcgctttattgtaaaatggaagtacatttagtggcaatatccgtgtgattagctatgtccagtcatcagatttttcttgcgttattatgattattacagattctattacactatgacattgagcataaatcaccagcctccttctcggcacatacaagagtcacttattttctaaaggttaccaaatatactaacttgtttaaacaaacgtacacacacaccttcctatatctgggtaggtacagactcagataaatcttcatacaacagcatgctataatgaaaagaacttaagttttagagtcataaataacttgatttgaatccatgagtatatatttacttactgtataatctagggcatgttatgtaaacacttgagaattcaatgccaaccttgggataacaaattttacccagcaagtctatgagaaagatcatagaaataacgcatgggaagtacttaaaacagtgtcctacacatggatacagatcaagaggtagtaaatacactcacaaaatggtctaattaagaaagtcttccatgagtttatgccctccaaaagatgagattcgaggccaattttgtgtcataaactttatgcttttataatattcatttctattttatgattatataatgcttaaataataatatagtaaatattcatgtaaaattcttacaccgaaagataaatattgttaatatgttggtggtcattaacttctccttctctctgttctttctcctctcttatttatgtgacaatatatgatccttttttctgaggtttaatagtgattcccatgttttcctcttccatagataccataaatctgttgatacacatgttctctttaccatgaaatagatcccttctctgtaccatggcccctataaatcaggatacactacattatgcatctataagaataattctgatatctcagcgactcaaaagaatagaattttcttcccgccaaacttcatgtcactatagattggtaggcgtctcaactcattgtactcagctgaaggacctgggctgagagaagggtcatctcaatataaactttaagaacgcaagagaacatgtgaaagcacacgataacccgtaaagcttctgcttggaaatggcgcacatcacttctgttcacatttaatttgatgaagtaagtcacatggccatatcaaagtacaagtaggcagagtaaaagatactatcaggagcctggaataaaagaatggaactttggtgaatagacttaatggcaaccacatcccttaaaacaagggttctcaaacttgaacatgcatcagaataacctagaggtttgttaaaacagggagtgttgggatccaccccctgagtttctcatcctgtaggtctagagtacagccagagcggttgcacttctcacaaattcccagttgctgttgattctgatgtctgagaaccacactatgagaactgctgccctaaagtataaaagctcttctcttaagattccacaatggaaaacacttcaacagtggtactttcgactgtccatggtcacatttcaaccacatacttctcaagtttccaaatttatctcaatctccaaccactggtctgttaataatttcccaaaattgctgtattatttcttttcctctggtggaatttaattaaaatatctttcctacaaaccttttccaaatcattctaactagaagtattgcctataccttttccatagtagtatacacctttccaaagtgatcacatgctttgtattatggtaatcttacacttgtgtttttctcagtttcatgaactgttttcaagcgcactcatagaaatttacccaaaatgaatactaaaacacttaattttttattcctgattttgccacattagggtaaaagacttggccacatgttctaaatttaaatcactactcttgtctcagaagccatgtgaacagtagggaggacagcataggttctggagctggactgcctgggtcaaaactaaccttgccactttttagctgtgtaaacttgtgcaaatttcttaagatccctgagccttttcctcatctagaaaatgaaagtgagaattgtattcataccataggactgttacaagaattaaatgaattagttgatttgaaacatttagtgcaggacttggcaagttttgagccattataaccattataattgcaaaacatcctgaagttattctctatgcctgaagttacattttcttaatatccattttctccttaatcccttaaaagctgtcttctgcctcatttattctatcaaaactgtattctcaacagtcactaattatattctaattgaatttcagagtgaatttcacacctctccttttgaaagattcatttctatgaatttgggacagcttcctagtatgatattccatctataagtatatccatatcatctatatcgtataccttatctgctctgctaactctttccttgtgttattatggatgttctccaattctgttctgcagacgggtgacaagtgaacatgtagaagaagttttcagtctcctagttttacctccattcaattaactttaaaatctacattactagttctgctgtgtcaccggcagtccaagaaaagaaacctgatcagtttgtgaaaatagctaatatttaatatgagcttattatgtgccagctactttacctggagtttcttatttaagccttacaattgctttattaagggctaggaacttcacatgtacattaaaatgtagaagcaaactgttgaggagagaaaggaatttacccatattatacagataactaataggaagtagagattggatttgaatgaatccaggactgatgtcgaagcccagtgtcttaatgttattttgggatgtctgcatagatttttttttctttataagggagtgatgattttaaaagcaacaagacccaccttaggtaaagtccatcatccaaaaccaaactcagttttattcctgtgcctacgcaaccacattattggatgcctagaaaatgttcaaacttctaaccaagtcactggtaaccctctgtgattttggcttaatcaggtttattcatcagttttgcccatatttcacttgagctctagtctcattaccttaattacagcttcctgtatgtctataggcttttgcttctatagacccaatttatatggtatcaactctatatgaagccgtttttgaatctcctagtaatgctttaattttcctaaaattcctgttatatcaaatcagatttcttttttatttttttgtcagttataagtttattttttgtgagggcaaaaataaatttgttggataatgagtttgtgagtagtagatcaatttgttcacatattttgcaaaagttagagcttattactcattcatgtactattgatgtaacgcattagaagacagttaacattagttcctaattgcacctgaccaaaaggagctgtgggcctggcctatacaccttattgcgtgttcagcatcaactgatttagtgaagcagcaaaaagaaaaatggtgtgtgcagtattatctttctgccacagatacatgtttttaatttccaagtttccaatgcatcattcagttttatctaatgggaatgcagctgagagaagtttgtatcaacccaaaactacatgctaatatagtttagttttcaagacttgtggagtctttttttttaatggaataagatcatcagaaatcctggagcaagacagactggctgtggtctaccagcattgtagtaaaaacattggggaagttttataagacctaattattagaaaataccataaaatagtcattttcatagaaaaagctttcctttctttcctcacactaaatcacattactttgtgttcaaggtaaaatggagtttgaaatctggatgtaaataagaaaagatattattttattccaagtgaaacatgtattcacacttcacgtcttgaagcaccaggtggccatttgggctgagttttcaagaaaaaaaaaattatatagattttatgtccccccccttttgttgttgctgttggtggtggtggtggtgatttttattttttggtaaagataataacatatgaaacaattttcctgttaattaaaacttactctatttatgagcatgatattttaaagaaattttttatatataatgaatatttggatatatatgtggttaatggttattttaacaaacattttggtttgctgaaatttttaagtttttttttcttttattattatactttaagctttagggtacatgtgcacattgtgcaggttagttacatacgtatacatgtgccatgctggtgcgctgcacccactaactcgtcatctagcattagataaatctcccagtgctatccctaccccctccccccaccccaccacagtccccagagtgtggtgttccccttcctgtgtccatgtgttctcattgttcaattcccacctatgagtgagaatatgtggtgtttggttttttgttcttgcgatagtttactgagaatgatgatttccaatttcatccatgtccctacaaaggacatgaactcatcattttttatggccgcatagcattccatggtgtatatgtgccacattttcttaatccactctatcattgttggacatttgggttggttccaagtctttgctatcgtgaataatgccgcaataaacatacgtgtgcatgtgtctttatagcagcatgatttatagtcctatgggtatatacccagtaacgggatggctgggtcaaatgcgatttctagttctagatccctgaggaatggccacactgacttccacaatggttgaactagtttacagtcccaccaacagtgaaaaagtgttcctatttctccacatcctctccagcacctgttgtttcctgactttttaatgatcgccattctaactggtgtgagatggtatctcattgtggttttgatttgcatttctctgatgcccagtgatgatgagcattttttcatgtgtcttttggctgcataaatgtcttcttttgagaattgtctgttcatgtccttcgcccactttttgatggggttgtttgttttttcttgtaaatttgtttgagttcattgtagattctggatattagccctttgtcagatgagtaggttgcaaaaattttctcccattttgtaggttgcctgttcactctgatggtagtttcttttgttgtgcagaagctctttagtttaacgagatcccatttgtcagttctggcttttgttgccattgcttttggtgttttagacatgaagtccttgcccatgcctatgtcctgaatggtaatgcctaggttttcttccagggtttttatggttttaggtctaacgtttaagtttttaatccatgttgaattgatttttgtataaggtgtgaggaagggatccagtttcagctttctacatatggctagccagttttcctagcaccatttattaaatagggaatcctttccccattgcttgtttttctcaggtttgtcaaagatcagatagtggtagatatgcggcgttatttctgagggctctgttctgttccattgatctatatctctgttttggtaccagtaccatgctgttttggttactgcagccttgtagtatagtttgaagtcaggtagtgtgatgcctccagctttgttcttttggcttaggagtgacttggtgatgcgggctcttttttggttccatatcaactttaaagtagttttttccaattctgtgaagaaaggcattggtagcttgatggggatgacattgaatctgtaaattaccttgggcagtatggccattttcacgatattgattcttcctacccatgagcatggaatgttcttccatttgtttgtatcctcttttatttcattgagcagtggtttgtagttctcctcgaagaggtccttcacatcccttgtaagttggattcctaggtattttattctctttgaagcaattgtgaatgggagttcactcatgatttggctctctgcttgtctgttgttggtgtataagaatgcttgtgatttttgtacattgattttgtatcctgagactttgctgaagttccctatcagcttaaggagattttaggctgagacagtggggttttctagatatacaatcatgtcatctgcaaacagggtcaatttgactttctcttttcctaattgaataccctttatttccttctcctgcctaattgccctggccagaacttccaacactatgttgaataggagtggtgagagagggcatccctgtcttgtgccagttttcaaagggaatgcttccagtttttgcccattcagtatgatattggctgtgggtttgtcatagatagctcttattattttgaaatatgtcccgtcaatacctaatttactgagagtttttagcatgaagggttgttgaattttgtcaaaggccttttctgcatctatggagataatcatgtggtttttgtctttggctctgtttatatgctggattacatttattgatttgtgtatattgaaccagccttgcatcccagggatgaagcccacttgatcatggtggataagctttttgatgtgctgctggattcgttttgccagtattttattgaggatttttgcatcagtgttcatcaaggatattggtctaaaattctcttttttggttgtgtctctgccaggctttcgtatcaggatgatgctggcctcataaaatgagttagggaggattccctctttttctattgattggaatagtttcagaaggaatggtaccagttcctccttgtacctctggtcgaattcggctgtgaatccatctggtcctggactctttttggttggtaagctattgattattgccacaatttcagatcctgttattggtctattcagagattcaacttcttcctggtttagtcttgggagagtgtatgtgtgcaggaatttatccatttcttctagattttctagtttatttgcgtagaggtgtttgtagtattctctgatggtagtttgtatttctgtgggatcagtggtgatatcccctttatcattttttattgcatctatttgattcttctctctttttttctttattagtcttgctagcagtctatctattttgttgatcctttcaaaaaaccagctcctggattcattaattttttgaagggttttttgtgtctctatttccttcagttctgctctgattttagttatttcttgtcttctgctagcttttgaatgtgtttgctcttgcttttctagttcttttaattgtgatgttagggtgtcaattttggatctttcctgctttctcttgtgggcatttagtgctataaatttccctctacacactgctttgaatgtgtcccagagattctggtatgttgtgtctttgttctcattggtttcaaagaacatctttatttctgccttcatttcattatgcaccccgtagtcattcaggaggaggttgttcagtttccatgtagttgagcggttttgagtgagattcttaattctgagttctagtttgattgcactgtggtctgagagatagtttgttataatttctgttcttctacatttgctgaggagagctttacttccaagtatgtggtcagttgtggaataggtgtggtgtggtgctgaaaagaatgtatattctgttgatttggggtggagagttctgtagatgtctattaggtccacttggtgcagagctgagttcaattcctgggtatccttgttggctttctgtctcgttgatctgtctaatgttgacagtggggtgttaaagtctcccattattaatgtgtgggagtctaagtctctttgtaggtcactcaggacttgctttatgaatctgggtgctcctttgttgggtgcatatatatttaggatagttagctcttcctgttgaattgattcctttaccattatgtaatggccttctttgtctcttttgatctttgttggtttaaagtctgttttatcagagactaggattgcaacccctgcctttttttgttttccatttgcttggtagatcttcctccatccttttattttgagcctatgtgtgtctctgcacatgagatgggtttcctgaatacagctcactgatgggtcttgactctttatccaagttgccagtctgtgtcttttagttggagcatttagcccatttacatttaaggttaatattgttatgtgtgaatttgatcctgtcattatgatgttagctggtgattttgctcgttagttgatgcagtttcttcctagtctcaatggtctttacattttggcatgattttgcagcggctggtaccggttgttcctttccatgtttagcgcttccttcaggagctcttttagggcaggcctggtggtgacaaaatctctcagcatttgcttgtctgtagagtattttatttctcctttacttatgaagcttagtttgcctggatgtgaaattctgggttgaaaattcttttctttaagaatgttgaatattggcccccactctcttctggcttgtagggtgtctgccgagagatccgctgttagtgtgatgggcttccctttgagggtaacccgacctttctctctggctgcccttaacactttttccttcatttcaactttggtgaatctgacaattatgtgtcttggagttgctcttctcgaggagtatctttgtggcattctctgtatttcctgaatctgaatgttggcctgccttgctagattggggaagttctcctggataatatcctgcagagtgttttccaaattggttccattctccccatcactttcaggtacaccaatcagacgtagatttggtcttttcacatagtcccatatttcttggaggctttgctcatttctttttattctttttcctctaaacttcccttctcggttcatttcattaatttcatcttccatcactgataccctttcttccagttgatcgcatcggctcctgaggcttctgcattcttcacgtacttctctagccttggttttcagctccatcagctcctttaagcacttctctgtaatggttattctacttatacattcttctaaatgtttttcaaagttttcaacttctttgcctttggtttgaatgtcctcccgtagctcagagtaatttgatcgtctgaagccttcttctctcagctcgtcaaagtcatcctctctccagctttgttccgttgctagtgaggaactgtgttcctttggaggaggagaggtgctctgctttttagagtttccagtttttctgctctgtttcttccccatctttgtggttttatctacttttggactttgatgatggtgacgtccagatgggttttttgtgtggatgtcctttctgtttgttagttttccttctaacagacaggaccctcagctgcaggtctgttggagtaccctgccgtgtgaggtgtcagtatgccccttttggggagtgcctcccagttagggtgctcgggggtcaggggtcaggcacccacttgaggaggcagtctgccccttctcagatctccagctgcgtactgggagaaccactgctctcttcaaagctgtcagacagggatatttaaatctgcagaggttactgctgtctttttgtttgtctgtgccctgccctcagaggtggagcctacagaggcaggcaggcctccttgagttgtggtgggctccacccagttcaagcttcccagctgctttgtttacctaatcaagcctaggcaatggcgggtgcccctcccccagccttgctgccaccttgcagtttgatctcagactgctgtgctagcaatcagcgagattccgttggggtaggaccctccgagccagatgcaggatataatctcctggtgtgccgttttttaagcccgtcggaaacacgcagtattcgggtgggtgtgacccgattttccaggtgctgtccgtcacccctttctttgactaggaaagggaactccctgaccccttgcacttcccgagtgaggcaatgcctcaccctgcttcgggtcgcgcacggtgcacgcacccactgagctgcgcccactgtctggcactccctagtgagatgaacctggtacctcagatggaaatgcagaaatcacccgtcttctgcgtcgctcactctgggagctgtagaccggagctgttcctattcggccatcttggctcctcctctcaaatcagatttctgatccaatatttcaagttttaattttcccactggtaggctctattcctactctttttctgctcatggctgaaaattttctgtatctcccatctctttcatatttgaatctattgaatacatagcctccacactcttaataaaatactaatttcatcatgtaacttcattattcaaaatatttagtggctcccactacctatattaaagattccaaactcagtagttactaatatttttcataggctttctagtcctgtcctttcttttagtcttatctcttactactttaagcttattcctagggcaaacatcttactatttccaaaatgtgattcaacgtcattcctattgcctaggaagacactcttctgtcctatggctctctaagtctacttcctgttgaagtactctttttcataaacattcaaattgtttttgtgtcctactttggtgttacctgacatattttaaaactcatggattggatcacatatctatgcatttacttatggcaccattacattttatttattttaagagacaagatattactcttttgcccaggctggagtgcactagcacagtcgtagcttaccacaggcctccaactcctgagtcaagtgatccttctagctcagcctcctgagtaactagaattgcaggtgtacaacacaatgcagaggtacatttaaacaattttttattgttattttgtagagacagggtcttgcttcattgccccggttggtctcaaactcctggcctcaagcgatcctcctgcctcagcctccgaaaatgctgagattaggaatgtgaaccattgtgcctggcccacgttacattttaacagtggggatctgaacactgcagtttcccaaagccaaaaacatgactaactcagctataaatatttaaccaactcttaagtatacctcctggaccatggtcatatagagcagaggctgtgctactatatatgctttagttttgctagtacatttagaaaattgtttattacatagtcagtactatggtgaatggttaagatatgttgaatgccctgctgagacaacgtttttactttgataggaaagtcaaaagaataacacacatatttaattattaaagaaccagaacatgtagttttctgaatttcttagtataaaaagctccttaagagacataagtatacaaatatacacttcttcatctatgatactctattaaatttggcatatttctttttaacaaaaacttacaagggtagaaatctgctgagatgatatatgaaatgtggaaatgttaaagatagattgggggggtggttaagataagacattgaagcatataatactcctcttggagaatcattcagcttgccaagctaccatgaatcagtgtttgaaaagaggcagaagatacatacatagaaaaatcagccaaaatattcattaacatgaaatgtttccaaagctgaagtgctacattaatggttgactttgtgcctcaagactaaatattgggcaatgttagctttccctataataaaacttgccccaaaatatatgttgagtatcccttatccaaaatgcttgggaccagaagtgttttggattttggatattttcagtttggaatatctttattatacatacgagttgagcatccataatctgaaaatctgaaatccgaaatgattcaataaggatttcccttaaaaatgatcgtgtagttactcaaaaaattacagattttgtagcatttcagatttcaaattttcctattagggatgttcaacctgtattgaacttacttgcttacacgtgttgcccgtttgctgtactgtaagctctgtgaaaaaagtatctgctgacttctttgttcataattgcgccctagcaccttttgtggtagttggaaaatggtagacactgagtaaatatttactaaatgagtggataggtaaaagtatttcagtttggcatggcaagatggaaagactaacagtgtttaagtggctatggccaacgtcaggccttcttcagtttaagaactgtggaaagaagaaaattaaacaattaaggaaagataagaataaatccaacaggaagttctcactgaagccaagagattcaaaaaaatacaggaagaagaagaggaagaaaatactattttctatgcattatattcccaaagatatctgccttactgattaatatcaattaataccataactatcacattttctcataggccaaggtgaaatgtctgataagacaagctttgttgctaacacaatttaactcactttagaatattaacatgacatttatgtggtctactcctctctaagctcaaataaagcagctgcgtataaaaagcagccatggattaaatgacttcagcctgctttgtggaaactactgctgttaaacctgctcttgataaactacaaagagtgcctggactccatttatgaaaagacatttgaatatagacctcacatggtgatcatttaaaaatattatattttgcctgtattacaacattgggttgtatttttgtttaaatctctacttcatttacttatgcgtgtaatactgacttgcttcacaaaatgttactctggagtgtctggcaagcttcctaacaagaaatttgaaagcagttttacatgaaaatcacatttttgaattttatatttctagacaagttttagtacaagcagtgtaagagcataagagtagtctatgtcatatgctatttgtcagtctccaatgaagagtaaacatttatcagcttcagtaacaatccctgcctaactgaggagtgtcattttctgaaaatattgattgatagaggccttgcctaaaaaatataaaatgcatgtaatttacacacagctgagaaatacaagctcattttttcctgacaagcagtaatgccctttataaactatggagattaaattacaaaaaaagttaaattaaaaacaaaagtatgatcagagtgatcagagttttgtgtggtacattttctagtaatcatgttttacagcagtctaatttggtaaataaaagtgaattggaatatattttaaaggctaatatgtatatgtgtgtatgtgtatgtatatacatgtatatgtgtgtatatatacatcatagaaacctttatatttaagagaaaatcatcaacaaatacttttaacacatttgttgttatgacgcagtaacatgtatcctaaattaggaaagtcatgtttccggatattttcctaaggaaatattggttctaaaaattcagcataggaacgtcaagtattttattattcactgaagggaccaataatatcaatgcaagcagaggcctgatatagaaaaattaattaaggtgattatagaggtgtaagcaggactctagtaaatgaatttagaaggtggtctagtcagttgcttgaacattaatcagaatttagagttctgctctgttataaactcaatggtctcgtgaaaccatttttatacaagtctcaatgaattcatctctatatagttcttgttccacctactttagtattttttgaggagcaaatgagataatgtgtgcgaacataagacacaatgtgtaatctaagccaatctgggcagattaccttctctagtgcagattagagatatctatgcattcactaactgaatttttgtaccagttggaagtgtttctgaagcagatcttttttttgctagtctattataattattaaagatgatatcatgcctaaaatttgtcacattaaagaagcatcagtatctttgtaacattcacacattgattttacttcaacctagaggaaccatgactgcctttaaccatttgaaaaggtctttatgaatctaccatctccaagatgaatacccacagcctttattattgggctcacttttggtgtcctttatcgtcatggtagtcatagctcctacatctagtaaacgttaggcctagaatttgaattgccttgattctcaaataatatctgaatccatcatcttatatatttataatttctttgaatatgtgataattaattcagggtaattagcacatccaatgtctgtgtgtagaaacattgtgttggaccccataaatatgtataattatcatgtcagtcataaataataaaaaaaacttcccacaaataatttataaacccatgcagtccttataactgctctttccaatattaatttcagacttaaaggtgatctgttaaattttatcttactggtttcgatattattatagctaagacatccatagctgaattttattacaaagagtaaaagctaccctttccaggagagtaaaatattttattataatagctgtatttttatgccttaagatccaagatcattggcaaggtatatttggtggaagcagtccaaatgagagtcacatgaccatcaagtagatataactttaaactgacacaaggccatttgccatcactttttggatagggtgtgctgccacatgtgtgtttttaaaatactatattttagtacagattcaaaattttgtctgtgaatttattatgggagacattgataagctacattgtgaatatgaccttatctatcgaactaataatatgatcaaaagagaaaatgacatttgttcatgggttgatttgctaaccccgcagtgtcataaatagtttatagtagtgtcattgcctccatagaaagttaagattgcgtagattcttcagctgtaataaatttgtaacatatatattggataaaagtatatgagaatgttcaaaacattatttagattaagagatatacctattagaaattgcatatattccaggggaattttttaaatttttgtgggtacatagtttgtatgtgtatatatgtatagaaagagagagacagtacatgagatactttgataaaggcatgcagtaaataataatcacatggagaatggggtatccatccactcaagcatttatcctttgtgttataaacaatccaatgatactgagttattataaaatgtacagttaaattattgagtatagtcaccttgctgtgctcgcaaatactatgttttattctttctaaggaatttttgtacccattaaccaaccccagcttacctccaccccctagtaccctactcagcctttgagttgagatctctctctctctttagctctaataatatttgctttatttatctgggtgctccagtgttgggtgcctaaatatttgcaattgttgtatccttttgctgaattgacccctttctcattatataatgaccttttttgactctttgtttttgtcttgaaatctgttctgtctgaaaaaagtacagccactcctgctgttttttggtttccattggcatggaatatcttttttcatccattttcagcccatgtgtatctttataggcggtcattaaagatgtcaagtattttgtagaatcatagcatgtatataaacacatgcatgcatatacatatatatacctatggactacaatattatagataaaatttcataagtgactatgatccatgatatgagaggcagagaatgctcagcagtgggatccctctctcaagccatactgtcaaatctagtatattgaaatttctggaacacccttatatattagagtctttaccagaaatgctggtacgtttattttaactgttattgcagaaatggctaagaaaacaatgtctagattctaaagcaaggattaggattgtatactttcttctgttgtgttacacagatacaaccaaacaatgactatttattaagtactatctgtggctaaggtgttgtacttgaggctgtgttatttacgcactaagctgttaaagtttatttgatgtttactagagctttctgatgccaagaacacaactctggttttggtagctctcttttttccattgtttaaaaatgctaaagatcatgcaaataattaacatatgataaacattttttaatctcagtaacattgtaaatttataatatgatgagaaaaagagctgaaagattactgatgtaatttataacaggttagtatttttagttcatcattataaacccagaagagaagagctaataaagttattcagttgtgcttatgtaaatcttttggatcttgagacttatttaatgactggatgaagattttaagtgccatgggatatgtgagctacatggttcaactgtacaattggatcactgttcattttatgggctgtgatatacttcacattgggttgatttattgtttcagagtaaaattagctttaacatgttttcttcctaactgaattgtaaatcaattatgttaacagctcctcttggtaagggcctagacaaaatacatatggtcaataaccattttgtgtgaaataagcatataaaaagcagactttagtagactactctagatttgcatagttcctcataaatcaactttatgaaaatgataagaactgaacagaaatttatttgaagaatttgagccataacagccttataaattaggttcacttcacctattttattcacctcgtttagtttcagcaaaaaagtctgatttaatttagagtttattattacttttgattttaaatgcacaattcttaattgtatatttatacattccagttggaccaattttttgaaaggatttcctcaagaagtagaattgcaccatttaaatgtattatatttgacttgtcaactgtcgaatctaattgtcatcatttgaaatacaacaatatgtgctaattattttagttttagtttttattcttttactggatgtacttaaggcaaccttgtccaactcacagcccatgggctacatgtggcccaggacagctttgaatgcagcctaactgtaattcacccactttcttaaaacattatgagatttttttgcaggtttttttttttagttgattagctattgttagtgttagtgtattttaggtgtggcctaagataattattcttcaaatggagcctaaggaagccaaaagattacatacccctgatttaaggggtacaagatgttacgatatacatagacataatgaaatgattactgaattcaaccaaattatcctatccattatcttccataataactgttttggtatggtaagaatacctaaagtctcttttcttagctaatgttcagtgtacaatacaatgccattaactgtagtcatcatactaagcagttatcgagatttatttatccaatataacttcaagtttgtgtcctttgacctacttctcctcatttcttccaaacatttaaagagtaatttataccatttgttcttaaaatcttctaaataatagaagaggaaatacctccaaagccatttatgacttcagcatcaccctaaatacgaaagtcaaacagacaccgcaagagaagaaaatatatatatgccaatatctaggaggaatatagatgtgaaagtcctcaataaagtattagcaagacaaataacacattggattataaaccgtgaccaggtgggtttagccctaggacacaaggttggtttaacatacacaaatcaatcaatgcgacatactacattaacagaaagatgaaaaaccacatgattatctcaatacatgcagaaaaagcatttgataaagctaaacatccttttattattataactcttcgcaaaatatgtatggaaggaaatttcctcaacatcaaggctatttatgaaaagcctatagctaatatgatcaacggtggttgtggggtggttgtactgaaagctttccccttaagatttgctaaaaagcaaggatgcccactcttaccacttccatttgtcatagtaccaaaaatactagcaggagcagtgagacaaaattaataaaaggctttcacatctgaaaggaagaagtaatattatttctgtttgcaaatggtatgatcgtatatgtagaaacccctaaggactccacaagaaaaatgttagaactaataaatgagttcagtaagtagtggaatacaaaatcaacataaaattagttgcatttttatgcaaaagatatccaaaaaattttaaaaaattctatttatgataacatagaataaaatatttaagacccaatttaaagaagaaagtgaaaaatacgtacaaccaaaactataaaacattgaggaacaaattaaaaggtaaatatatgggaaaatatcccatgtttgtagactggaagaagtaatattgttaaaatttccatactacccaaatggatatatagctgtcccttggtatccacgggacatgggttccaggatgccagtggataccaaaatccaaagatgcttaaatcccttatacaaaatggcatagtatttgcatatacctatgcacacccccctatatactttaaaacatctatcgattatttgttattacacctaatacaatgtaaatgctatagaaatagttgttaccatatattatttttacttgtattaatattttttgttgttgtattgagttttttgttctatttttgattatttctggtctacagttgcatccgtggaaatagaaggttgactgtacaaatttaatgtaatccctgtgaaaatctaaatggcattttttttcacagaaataaaagagcattataaaacttacatgaaatcccaaatagccagaacaatcttgaggaaaaaaaagttggaaatactgctctttggatttgaaattatatcataaatctacagtattaaaaagagtattgtaatgccataaaaacagacacataaactgatggaacagaatagagatctcacaaataaacctaagcctatataatcaactaattttggacaggaccaccaagaagatatgtggggaaaggacagtctcttcaataaatggtgttgtaaattgtacccttgtcttatactgtacacaaaaattaagtgaaaatggactaaagacttaaatataagacctaaaatcataagactcctagaagaaaacagagaggaaaaagctctctgacagtcgcctttgcaaggattttttgaatatcacatcaaaatttcaggcaagaaaacaaaaataaactagtggaactacattaatctaaaaagcttctggaaagcaaaagaaaaacacagcctacagattatgagtagatatttgcaaaacatatatctgataagggtttaatatccaaaatatataaggaacttgcacaattccatagtgacaaactaaataacccaattaaaaaattgggaaagaacttgaacattttttttttcaaagaagatgtgcaaacggccaacagggaaattaaaacgtgctcaatatcactattagggaaatgcaaatcaaaatcataataaggtattacttcatacctgttaggatgagtattatctaaaagatgagataacaagtgccagtaaaggcaaggaggaaagggaaccctgacatactgctggtgtcggtgtaaattagagcagacattatggaaaattgtctgggagtgtttcctcaaaaagttaaaaatagaactaccatatgacccaacaatcccactcctgggtatagacccacagaaaatgaaatcagaaccttgtggagatagccttactctcatgttcattgcgttatgattcataatagccaagatatgaaaataacctgagtgtccactgacagataaagaaattgtgacacacacacacacacacacaaatattcagcctcacaaaagatagtgccatttgtaacaacataggtgagcctgaaggaaattacactaagtgaaataagcaagacacagaaaaaaatatgctacgttatctaacatctgaaatctgaagaaaatgtataagttgaatacatagacagtagaatggtgattaccaggagtagtgagggtgaggaaataagtcaatgtgtacatggaaacttgcagttatgtgggataaataaatttagagtttcgatatacagctaacccttttttaaaaaaatataaaagcagataataatggggtaaaatgtagtgttttgatctatgcatacattatgagaaagatttgatctagctagttaaaatgtctatcgcctcagctacttaaccctttctaatatttatctaaaatatgtcagatccagagatgtatgaccagattttaacatcatttttaatgtagaattgacagttgtaacaatgattttctcagtttgcttattcaacacccatggaccaagataataaatttaggacctatttaagtagtttctaaaaaggcgttaaaaaaatccccatgggggcaaacaatgtgaatcgaataacatttccaaatgaatgtaatttgctcatttggatgtgagctaagtaaaaaaacgattgtaaaagaaaatgtaagtaatagaaattatctaagaagagcaatgagatgtgttccatctgtgaccaattttggtcaattttttcacaggcatttaatgggtgcaaaatgagccagtcttggtattagaccgttaaaatgcattgtcttctaggagttcatattgtttcccctcccattctgaaaaaaattagaaaaggtaacaacaataaagaattgtggtagacaaaaactcttttgtaaggtatgatttgactcgtataataggtgttacgagtgttgagtggctctgtcagatagaaacagtcaaagaaatgctagtaatgttgtcttgtttgctttacttgtaagtatcttgtgtattttatttacttaatatatttaatttactttaatattaaaacgtgtgtgtgtgtatatatatatatatatatgaatgaatgaattctaatgggtcaggtcatatagtatgtgtgtgcacgtgtgcacatgcaagctgggataacaacgtattatatgatagagtctatctggtgataaacgttcagaggttggaaaagggcattgtgtaccaagctcttgaggtattctgggaaataactgcacaccaagcatttggatattgactgactgataacagtaaatgtacatttattcagctaaataaatgaaaaaaaaagtatcaggcattccaagcagtgaaaataacttaaataagaacacaaaagtaagtctacatttaatatgctcaaagcatcatgtgcatctgtacaatatccaaaatatttccaccagaattaaattttgttattccattattttactataatatttggaggcaaatgcatattaacataatcagtttaaactttgcaatactaaggtttctcttttatttagtacaatgacccaaagttatagaattatttgcctctgatttcttggcaacatatgtatactttactgaaaatttcatctacttcattcttcatcaccctacactcacacagagaaacaaattgataatgagaaattgaaaaggaatatgaaagctcagtgctgatttttatttggttcatgtaaacctctagaagcttagctctattaagattatctgaacctttgtaatactttctatttgaagctatttgcttccaaccagtctatcttatattaattattattttcaattcatcagattatgtggatgcaatggctgataagttgagatatactttgaggaacactgctatgataatcatgatagaggatgcatgggtgattcatagtatttccaactatgtccagttatgtttagtgtttgtgaatcacctatttgcctaccttctctagttgagtaactatatatgtaggtaattgaatcagactattttgctaccaagaatatagcctcttccccgatataaagaggcaccaattacagattatttacctaatggagcattttaaatatggaaggttattaactatttacacttgagtcaacattggaataaaaagttttagctgacaaaattatttgctaagtgtgtacttccatccacatttgccatatattttaaagagcaataaggaaagtcttttaaagtgatgaaattcagggctttcatttaattgatgtttttatgtgacatatttatattaataataaaatgcaaaacagtgaacaggtaatatttaatctttgttcttccttttcttaaagtcaggaagccagaactagtcagtcctatcagtaaaagcaaaagtaatatatccaatgacatttgcttaaatacattaccaagtcctgagaaaggttcttactaatctgggaataaatgtccttatcttgatatgtgtattagtccgttctcacattgctataaacaactacctgtgactgggtaatttataaagaaaagaggcttaattgacttgcagttccacaggctgtatgggaagcatggctggggaggtctcaggaaatcactgtggaaggtgaaggggaagtaggcacggcttacatggccagagaaggaggaagagagagcaggcagagatgctacacgctttcacacaaccagatatcatgagaactcactatcattggaacagtaagagggaaatctgcccctatgattcagtcacctcccaccaggcgcctcattcaatattggggatcacaatacaacatgagatttgggcagggacacagtgccaaactatatcgttctgccccaacccctcccaaatctcatattgttctcacatttcaaaatacaatcatgctttcccaacagttccccaaagtcttaactcattccagtattagttcaaaagtccacagtccaaagtctcatctgagactaaggcaagtcccttcaacctatgatcctgtaaaatcaaaatgagttacttccaagatacaatgagggtacaggcattagctcaaaagagttaaatcgatcagaagaaaggggttacaggccctgtgcaagtccaaaacccagcagggtagtcattaaatcttaaagctccaaaataatttcctttgactccacatctcatccaagccacagtgatgcaagggacaggctcccaaggccttgggcatctccatccctgtggctcagcagggtgtacagcacccttagttgttttcatgggctggcattgagtgactggggcttttccaggtgtatggtgcaaactgtcactggagagaccattctaggctctggaggacagtggccctcttctcaaagctcaagtaggcagtgccccagtggggactctgtgtgagagctctaaccccacattacccttctgcactgccctagtagaggttctctatgcaggctcccccgctgcagcagacttctacctggacatgcaggtgtttccacacattctctgaaatctaggtggatgctctcaagcctcaactctcacactctgcacacttgcaggattaacaccacatggaagccaccaatgcttatggcttgcaccctctgaagcaacaccccaagacacatctggggcctttttagtaacagctggagctggagtgtctgggacatagggagcagtgtcttgaggttgtgcagagcagtgaggccctaggcctggcctccgaaatcatttttccttcctagacctccagacctgtgataggaggggctgctgcaaagggttctgaaatgcctttgggcattttcccctttgtcttggttattaacattcagttcctttttacttatgcaaatttccgcagacagcttgaatttcccccaccaccccgagaaaataggcttttgttttctaccacatggtcaggctgcaaattttctaaacttttatgctctgcttcccttttaaatataagttccagtttcagataatctctttgctcatacatatgaccgtatactgttagaagaagccaggtcacatcttaaatgttttgctggttagaaatttcttctaccatataccctaaatcatcagtctcaagttaaaagttccacacatacctagagcaggggcacaatgctgccaatctctttttgttaaagcattgcgagagtgacctttattgcagttcccaataagttcctcatcttcatctgagaccacctcagcctggatctcattgtccatatcaatatcagcattttggtccaagcagttcaagtctctaggaagttacaaactttccctcatcttcctgtcttctgagcgctccacactgttccaacgtgtgcttcttactctgttccaaagttagttccacgttctcatgtatcttcgtagcagtgccctacctctcggtaccaattttctgtattagtcctttctcgcattgctataaactacctgagattgagtaatttgtaaagataagaggtttacttaactcaaagttcttcaggctgtacaggaagtatggctggggatacctcaggaaatttccaccttcttgtggaaggcgaaggggaagcaggcacatcttataccttacatggccagagaaggaggagaaagcagggggcagtactacacacttttaaacaaccagatctcatgagaactcattatcatgagaacagcaactgggaaattcaccctcatgatcctatcatctcccaccaggcccctcctccaacactggggaacacaactcaacatgagatttgggcaaggaaacaaatccaaatcatatcaatatgctagaatgactcaaacaataaatacgacaagaatattcctcctctgtattgacgctgttcagtatttttctggagaacctagccaatattatatgacgagagaaagttacatgaaatatatattggaaagcacaagataaattatttgaaaataatatgattttctcattatgtaaaatgatctcaaaattaggaaatgtacagtggtaataaaatgatactcagcatagttactttttgtttttcagtttccacaaacaagtgagatcatgcaatatttttctttctgtgtcttgcttatttcacttagcctaatgttcttcggctccatctgtcctgtggcaaataagaagatctcctttttttgtgtttctgttttgagatgaagtctcactctgccactcaagctggagtgcagtggctcactgcaacctccacctccccggttcaagtgattatcctacctcagcctcccaagtagctgggatttacaggcgcccaccaccacacccagctaatttttgcatttttagtagagatggggtttcaccatgttggccagggtctcaaactcctgacctcaggtgatctgcgtatctgcctgccatggcctccctaagtccctaagtgctaggattataggcataagccaccacacctggtcaagatctccttttttttttttttttttttttttttgatggaatctctgtcaccaggctgatgtgcagtggcacaatctcggctcactgcaacctccacttcctggctttaagagattctcctgcctcagcctcctgaatagctgggattacaggcgcacaccaccaagccaaactaatttttgaatttttagtagtgattggcttttaccatgttggccaggatggtctcaatctcttgaccttgtgatcctcctgccttggcctcccaaagtgctgggattacaggcatgagccaccacgcctggcccaagatctcctttttaaaggccaagtaatattccattgtgtataactatatagagagaataaaacagtggttaccaggttgggggtggaaggaggaaatggggagatgtaggtcaaagtctataaagtagcaaatatgtgggataaacaagttgaaagatctaatataaaacatgaggattatagttaatagtgtgttgtattcagaatttttactaaatgagtagattatagcttctcgtggtcagagggtgggggaacgattatgtgagatgatggatatgttaatttctttcattatggtttcattatggtaaccatttacatgtgtatcttatagcatcatgtgtataccttaaaacacacaataaaattatttttaaaaaagagaagttccaaaatctatgtagttttcttagaagtaaaccgcacaagaaagtataagcttttttttataggaagtttaaagttgtatataagtacataaataaagacatgaggaaaggaagtcacatatgatgaaaatgctagttctccctaagttagtttgtacattgaaagtaacttcagtcacactcgcatgttcactggagcactatgcgtaatagcaaaatcgtggaatcaagttgtgtccatgagtagataaagataatgtggtgtgtatatataatggaatactaacgagccacaaaggaataaaattatgtcttttgcagcaacatggatgaaactggaggctatcatcctaagtgaaataagtcagaaacagaaaatcaaatactgtattttcctataagtggtaactaatcaatgggtacacatggacatacagaattgaatactcaacattggagactccaaaagatgggagagtgggaagggggtgagagatgaaaaattacctattaggtacattgtagactatttgtgtgatgggtacactaaaagccgagacttgatcactacacaacatatccatgtaacaaaattgcacttgtaccccttaaatctaaagttcctgaagttacttcaatcaagatctagatggtccctgacttaagatggtttgactaatgatttttcaactttatgatggtgtgaaagcagtgtgcgttcagtagaaaccgtactttgagtacccatttaatcatgccatttttcactgtcactactgtgctcaatgcattacacgatatattcagtactttagtttttatagaacaggctttgtgttagatggttttgccaaagtataggctaatgtaagtgttcttgcatgtttaaggaaggctaggctaagctataatatttgacaggttcagtgtattaaatgcaattttgactcactatattttctatggacaatgggtttattggaatgtaaccctgtcataagtcgaggagcatctgtataattacacactcacatgcccacaaacatgtatgtatgcgactctctgtgtatctatatttgtattattttagaggatataacagaaccctagcaataaatagaatttatctcagatggtaaaatgaagataattgtattttaaaagttacagaagtatatattaacaaataggtgacaagaaataatctagagaggagcaatagtaggaagtagttactatttctactattcctactatatagtagctgaaaggaaagggggaacggagttcagtgaaagctgcaccaatggagggaatgtagttgttggtagaactcagatactacattatgcagctctggagcagggaaataatagagaaatttccccagctttctctttccctcttctttcaatctccagctggtacttcccaccagcttaatgcaactggaatctagccagctaatgatcacaggagatacagtgtgaaagggtcagccacttagagaataagcagagaagaaagggtgtttatgttcagggtgagcacactgaacataaatcacatgaatggtaagagggattcagttttctagataattctaaaatttgtttaaatgtaaatgcgtgagtacagttaagaaattattttcaaacaggtgatttgctttagtagattttataacatacttaacatagtatgacatgatagagaaataatttaatggtgtggaatagatattttgacaacattcccttttatttaggtaaatttagtacacaattagggtgacatttcatgtctctagagatagaataggttagctaataaagccttcaactgtggaaacccaaggcacaacaaatactaagataactttcagataatgattgaatgtgaataaacatttaaatactttattacaatgtagaagaatattacaataatattaaggtgatataaaacctagaggctgtaaaataccgacaaatttaccaacacaaaattaaaatattttccattgtgaaagaccattaaacagtaataaaacctatgatggactgcagaatgacactagtaataaaaaatcaataacctcagtatgataacactcctacaatgaatatacaaagtataatattttaaaagtggctacatattatggtcaggacattcacttgggaaaattagaaatagcccatcaaaataaaattaagcttaactaataaataaatgcatagtacaaatatcttcttattatgagggttcatgtaaataggccctgtgtttcttttggaggaaacacaacttgtaatattttaatcagacaatttagtattatctttcaaaatatgtaattttacatatatttgatcctgaggtttcacatttaagaattagatatatagtaatactcatacatatctacgacaaatgtgtaaggatgttcattgcagcgttgtacacagtagctccagtatttttcatgctatggactgttaggcagatatatctctaccattggactataggcaccataaaatcagggtctaggtttgtttgtgtttgtttttatttttgctcactatttcagctgcagtgtccagcataatcctcgacttatggcaagtgtccaataaatagttacagaataaataaatggataaatgaatacatgcattactgaaattaattttgaagttcacattgtatatatacatgtgtatatacattttaaacttgaaatttgctgaaaacatactttatgccaggcattgctctaaatgccttacttgcacttaccttcttggaaaagtctttgcctcattttaccaatgagggtatgaagaaatgaagaaattaagtttcttatccaaattcataataccagtgagtggtaaagctaaattttgaatctttactaattgagcacatcttaagaaagtacatgcatagacagtgtatatgtttaatctcattagacaggcagatgagtatgataaatggatagctaaaagaatggctgaatggatagatgcatggatgtatggatgacatagcatctggtgacaagtattacttctagctaatgggactgtggtgctgtagagatatggggtactttcactattaactttaaatgcgtctgtactgttttagttttccactacaataagcatgtatggcttttgtaataaaatgtttaaaagtgagagattaaatccagacttatgaaattaaaatatcaaagacaactaacggttgaactcttggggccaaaaccgtcaatgggatgtgttttctctgagggaaagctttcctaatcaaggggcacgttcccattgagataagagtggaaatgacccatctggtcaatccaagatcagagcccatatggggactggagctatgataaggagtcaggctccataggatatagtaattgagatagttataccaagcccctgggtttctggtcatcaggaaagacaggcccctgctagtagagctctacctgagggagaggtatttgagagaggccgacatttcagagtcaagaagaactggaagctataccaagaaaatgggttatgtggtatttagcatatcagttttaaccctcatccagccactgagaaaaggaaagaagaaattttaaaattgcaaatggacaaaaggaacattcagtaattaaaatagcagtaagattctacgcaaagcctttccttttctctatttagtctttgaagttgctaatatctagtcaaagggagttgctttccaaatatgtaatgtttgcatgcatattatagttatatattagtgatcatattgtttataaatgtgtgtataccatcctaggtttttgtttctttattgaatccctttctcatatatctgagcttaaaaagcattttttacaattatcattatttggtagaatcctacccaccgctgactcatagttttagtgagatgacaaggaattcacacacttgaatctttcaaacccccaggtatgcagacgcttagcacaaaatttttggaagctatgcttccaaagttctaaggagtctgcttttcctatcctcagtctgagagcacttgagtacatttttttttctgtagatatcagtcaatattatttttgaaaatacgtttttgtaaagcacggtgctattttgtagtgtgtatgccaaagtttagaacaatgaataaaacattagttttcctgtgtcttgagtattttcaatctgaatttaaaatgtactaactttgtcatcatcactcataggcttcttgattaacctgctaatgctctctaatttggaaattaatgcttctttccctatcacttaaaaataatctgatacagtttctagagcatgagatgttcttcaaatcaagtcttatttttggaaatgtgatcaataagaaaaacttcttgcaatacaataggaagctgaggtgcattatgcttaactttatccaaggtcacaaaatgaaagaactgggagccaaaccaaggactctacttttttttttccactttaatcagactgtcacttattggttgtatgaccttgggctgtattcttaactcacaagagagtggtgaatttaaatgaaaaaaaaacataataaaagttcttgtatataattgatacttgataaaaactaattctataccaaactgaatctcttttgcagaattttgtagggagaaaaatacaggctgctcctgttccttgctatgtgctttctgccccttcaagcagtgctcaattttcaacatgtgtcttactctacattcagggggtgtagaccatgaaaatgaacctttattcccaaaaggttctctctccattcatttactgatttaacaaatactgagtacctactacttctcagtcattggtaaaacaatctaaaggaagttcctgcctttgtggtttttatattcttatataaaaaataaacataataatgacagtttgtgacaagcaatgtaaaggaaatcaatgtaaaataaagggaaaggggttgggcttctttaaatgggataggaaatgcatctctgaagaggtgccatatgagttaagacctaatgggtgagaatgaatcaaaaatgcaaaaagagaaattattttaggtaaaagagcaccaaatatgaagatcaagaggtgtaaaatggccttcggtatttgagatgcaaaaacaaaacaagaccaatgtgtgaaagagaaagagggatgacattagagtgcttttagctaagtgtgaaggattgggtcatgctgtactttacaggcatggaaggcagtgtcttttaacacatacatcaaattctattcactattcaaaaaatatactttagtatatacattttaatgaaaatcaatctcagctatgttttacgcattcttaacatcatttattacattctcttttataaagttatcccttatcatcatcatatttgtgttacatggttttggatgcttactctctttttcacttgtacctttctccatcaatgcttcacatttgattatcttcacttctgtaaatttctaaattgcatttttttcacattggaaattacttgacatccatggatattattgtatttgtagttgggaggtcctaattacaatggtggaagccagaaactccaaactcaaatgaaatttcataagtactgtcaaaaggaaaatgtatctttgtaatttgaaaatgggttaaagtttgctacttcttgattgggtgtgtttcatcagcatgcctccagtagtgcttagaaaatacacaaatgcgtgatgttcgtccactggtttcagttttcagttagagtactactgaaaactttggattagttcaggaaaacttaattcgccatcagttattttgtcagttgttgaagtttgtgtgtgatggtgttttgctcaacactgaaccccttattctgatgttgcgtatgacatatgataccaccatgacaccatcccacataaatgttttgtgctgagagagtcacatcagtgttgtatgccatctggtttgtccaatggtccactcgtttcttccttaggaattaggaaatggagccattctaattataaaacgtgattaattgcttggtgaattggtatcatgtctgacacatggtaggcattccacaaatacttaatgaaggcatgaatgcaagcaaacctatgaattacaattatgtgccaattggaaggaaatcaggaaaaataatagatcgtatatattgagcatttactttgcattcattttctctgttaacatcatccctaattatttgcaagatactaatatgactcattttatagataaaaactgggacagggaaattagtgaattttaccacagtcccttacctattagtgatagggtcaggatttgatcaaggtatttttgcctcaacaggctaagctcttttatatgtagtgggtccatttttaccatatttttttcaaaaaaaaaaaaacctgatcattttgtacaatatctgcgttaagctagtcatcattgagtaatttgccccaggactgcccttataccatcaggcatattttgaaatcccaaaatataccagaaagaataataaccaattaaatttatgtcacatgaaataaacatctttattctggcctcactgtgtatcaagtataacttctaacactgtaaacaattaaggttcacaaatagactattttatgttagcgaggaagataaggggtggagttacttctgaaactgactatactttttctagcagcagaggaaagaaaaagtcaatttggttaggtcaaaagcaaagcacgaaaaccgcaggtgacaatcacttaagcagagttaaatgtcactgagtcaaaatactttcatctcaaatgtaaaccctaatagttcttcccacaacaggcatgtcgagagaattgtaagaaagtacagatgtttttctatctgtagtctcccatgctgactgagtagcttccatttgttatgtcaagttagtgtctgttctcctgggtttagaagttacataccaaatatttgttctaaggatttaaatagtcaaggatgtatttttcaaataaaatatatttaacatatgtaaacttaggacaattgtgacggaagagacaattttgaaaatttcctgcatttggaaattgaaaatttaaagatagaacttttcctgttgattagggcacacggcagaaatttgatttttgaaaaacttttcaactgaaacacgtcttatttaaaactcctaaagtcacagttggttgcgaattttcatttaactgacttttccccaccagcttctgtgcatttgctctgaggcactctcaggatgtttggtattaacactgcagagcttccattctgatttaatttccaaaaactatcccagcgaagagggcttttatggaaggcaattcaatgaagcagggatacagtggcaagtggtaaactgagaattttgaaattatttattcgtaacttcctttcccattacagtcattctttcatgagaacatatctctgggatcatttatttaccattgtattattaaagtctaaaatatagcctggcacaaagtaactcaataaacgtttgtggagtatatttttctgtgtctcatattttcaatatagatttttttttaccccctccgagacggagtcttgctctgtttcccaggctggagtacagtggcgtgatctcggctcaccgtcatctctgcctcccgggttcaagcaattctcctgcctcagcctcccgagtaggtgggattacaggcatgcaccaccatacccggctgatttttgtatttttaatagagacggggtttcaccatcttggccaggctggtctctgaactcctgacctcaggtgatccgcccacctcagcctcccaaagtgctcggattacaggcatgagccaccatgcccagccatagtttttacaatcactatcattacttccagctaccattatttactggattggctgcatgataagttccatttgtattggtaggtttaggatttattgattaacagaacgctcaaatagttttcagtgtatcagtcttctaaaagcatctgattttccttttttccctgttatgctctaggcaagcattatgcattttgagccactgtttttttcttttttaattttttgtttgtttgttttttgagatggagtctcactctctcacccagggtggagtgcagtggcccgatctcagcttgctgcaacctcctcctccctggttcaagcgattctctaacctcagcctcccgaatagctgggatcacctgggattagaggcgtgtatcaccatgcccagctaatttttacattttttttttattattatactttaagttttagggtacatgtgcacaacgtgcaggtttgttacatatgtatacatgtgccatgttggtgtgctgcacccattaactcgtcatttcgcattaggtatatctcctaatgctatccctcccccctccccactccccccaccccacaacaggccccggtgtgtgatgttccccttcctgtgtccaagtgttctcttttttcagttcccacctctgagtgagaacatgcagtgtttggttttttgtccttgtgatagtttgctgagaatgatggtttccagcttcatccatgtccctacaaaggacatgaactcatccttttttatgactgcatagtattccatggtgcatatatgccacattttcttaatccagtctatcattgttggacatttgggttggttccaagtctttgctattgtgaatagtgctgcagtaaacatacgtgtgcatgtgtctttatagcagcatgatttatagtcctttgggtatatacccagtaatgggatggctggctcaaatggtatttctagttctagatccctgagacatttattcagccaaaaaacacatgaaaaaatgctcatcatcactggccatcagagaaatgcaaatcaaaaccacaatgagataccatctcacaccagttagaatggcgatcattaaaaagtcaggaaacaacaggtgccggagaggatgtggagaaatttttatatttttagttgagacggcttttcaccgtgttggccaggctggtgtcaaattcctaacctcaggcgatgcacctgcctcgtcctcccgaagtgctgggattacaggcatgagctaaagcgcccagcctgagccactgttttctacttgtaacaagatgatggtgatagttttctgctagttacaccataagcatgttgaaaagcgtaatggaaagtgcaaaagataaaattgttttgtgtttctcctggataaatataggccattactttttatcgttattaattttatgatgaaattcaatcatcttcatcaacgcaaattatttccattatgacattttaccgtcctttaatgagaagcattgttactaaatggtaaaagcaactgcttgtatcagtgaatgaagtgctaaaaatggattaattaaggagtacttaatttagctaaggcagaacatatcttgcagaatgttaaaaaatttaacatgggaggagttgtgcaaattttaattaaaatgttgtatatctattgtatatagtgacttgtaagtagagaatacatgtatgtacaatgcagtcagtgctgaatgccaaatacaaaatattaaaaataacaatatcatgctttaatgaattagtccattgccatgatatggtctacaacttagaaactccagcatttagatatcagatgatattataacataaatctcttcgtatgcaagcctcaaaaaataatccactttacttccagcactttgtccttttagaatatcacatcaatgaattaggttattgtttacaaccataggttttggttgtgccaacatataggcctttctgttttcatattttgagcattctggctatggctagtttatgaccagaagtgccttctttccagtttctctattccttttcttctcagtgaatttatttatttttgtttcctaatacaaaccctgtggggaggttgatgctcatcatggtttctaaatgacatcctctcacagtttttgttgtttaataaaactcttaaaagactgaccaactaaagctttgtgagtgcacatttatacctgctatctttgaaatcttgcttgttttcaattacacatgctatgcattataattctgtatttccattcctgcctgtcccttggcagaaacttggcctgaaatttagacagtagagcctcttctttagatttcccagcggtgtttgaaggttacacccagcgactggctaatcggacttccctgaggttgactgcccaagattagttttgttgaaggcactgctttcatcttacttactcacattgactttcttggggtgagggcatgttgaaagcaaactttgtgcgatacttggtcttcaaatacactgagatagtatctgagagaatgaggttaaggtaccatggcagtgtagtgcaatgactggtttctaatctgattttgactagcctttgaatttgccttcagaccgccatgaggttcaacttctttattcgaaaaatgatcaaatttcgctaaatgatttatttgttccatagtatcctcaaatatgaaacactcatcagaaacggtgttattgttcataaagtaaaatctctagcagtattgtgagttctcactattttcattctgagacggcttcaaagattggataagcaattattaaaatctggtgtccgtgagcattttatgtagtagagtcttggtgtaaaattacgttcatgtaattgttaagttcttactttggggattcagccactgctctcatttcataaaatcttaatgtcgtgtaataagaagtataaattacatcccatcattttcatactcctcaaatactttatagtactcattatcataccattgcctttagtcactgtcttacataattctcatcaatttctatgactttaactgtcctctgtattgagtttcttaacaaatacttaggtgatcacagagtgccaggaattggccttagtgcagtcatcataaatgaggattaccccgaagtccataacatttattttgatttcccataaaaagtaatgtttataattatggggtggctcatctgctatatactcataatctaacatagtctaagtatattctatagcacatgacaatcacttagcacatatggaataagtgataaatgctttttccttctaagtaaattcttctggcttcctgttaatagtatacaaatggtctcctacaactaggtttgtttttgtgttaatgatagaaacagcaaaaatatgacaaaaatgacaaaaaaatgcaacatagtaatggtattaaggttcaacaaactttacagttttactaaacattggatttgggcttcataacatcttaaataagagggaatgctcctggtcaaccacagtctctgaaaggagcgtattcttaggttttgcggggggagtcagaagtccagcaatctaagaacatttcagattgggaataggatgatgatagctttagaagcgtggtaactcaggtgagaccattgttaattagtttgagaattatcttcattgaagtgaatccactctggcaaagtttcagaagggagtgtttgctgctggttggctgggggaagcatgataagaatcatggaggaactaattgttaaatgaataaatagggtagattgaaacttttgttggtgtctacttgttaccatggctgcagaacaatcagtgtcctctttcgtcctcttcctcctttgttttattgtcagtttattaatctttatatcctaaggctgtagcacataactttgtatataggcatttccaaagactgtggagtaaatgatttgaaaattgaatgaagtcatttttgatccatcttagaatttttgtcattcattgacttgttttcatttcccccgtacacagttgtaccttagatcttgaacactttatatctggattatggtcctagcctcctatttctctcaagttttcctccagcaatccattctgtacttaaagaatttactttaataaaattttgatggtgtcaccctctcattgaaaagtatttactctctagtctattgaatgaaggccaggttttctagtttgctgttgatgatccctcagttttctatgtacaatctaccagtttcatcttagttttcactactctactctctctaagacacacaaagccactgttgccaagacatcgctaatgtgtccctacctctgcatgtttattctacatattcccactgccccgaatactcttccccattccctcatttccagctattgaaatcctatgcataattaattcagtttcctatttaaagagaattgccttatcctccaatattatatgattttaaaaatctgaacatgttaaacaactggttgtgccaattagaggaacacattttaaattctgttcagcaatgcaattactttgtacttctattatttactttcttattccaaattagaagcagaattcatgaattttctatctttcaaatttcctggataatccattaaaatactttgaatataatagatttcttgaaaatgtatgttgatgaaattcaaaatattttagaagacctaaattcctttcttcaaaaattacttatttctacctactggcagttttgaattccacataatctcagaagtgggatagtaatagtttggggcaaaatggcaatagtttggttaaataagtgcatatttattgtaatgactgatatttatgaacagctgcatttagtccacatgttttatgtaaatgaaatttattacaatgtttgaaattttttggggggcaataaaaataatgcttggccaatttttcaccattttttactttttataatggcatatatttgagaccaaacatacatgcatgtgtctatgtataacacagcagtgaataggcacaggctcaaccctttttgttttctcacatcatggttttatttaatatactaaaaatgaaagagctctaagttatgctaatcacaggtacagctgactagttactagtgagaaggaagaacattttctagaatttcaagatacggtgaagtatagtatctactatataagaaacaattggtcaaatattttgaaaaacaattatcaaatgaattggagatttctaggcttcagaattccaaagctaagtttgtaagattattaaggaaggcagtgttcatgcacaaaatattatttagttcttctttaaaaagtacttgcaaaaattactttgaccatctgttgattaataattaaagtgtaataagttgagccatatgtgttgtataactttgtacctttcagccttgtgcattgaaatgtctaatatcatttgaataaatgaataaaacaataaaacgggagatgatgtaacagtctgcttataagtaatgtttttggcccttattcaaaatgtagcagactagcagtttcagcatcacttgggagactattgcaaatgcagagctccaggctctaccccgatctattgaatcagattctgtagttttaaaagatccccaggtgattcatatgtacattaagaattgagaagcactgtattgttctacggatagaagtagaccaaggaacattaattttttcgtctcttgtaactctttttaaaaatactttaaaaatagctgttctgattaatcatggttctgatacttgcaaaagaattgatgaagtcacttgttcaacctgcttttgtgctaacggacttgagactttactcttggctttttcacttataatcagaacacctgatcagaatatacatactgaatacagatatcttaatagtagttaagctaagataaattgtatggcaaggaaaatacattgccacattaccttgacctcctgccaggatttatgtttatcttttatctttgatttttatattcattaatgattaaaaaactaaaattgcatacatttatcatgtacaacacgatgttttgaaatatgtatacgttctggaatggctacattgaactaattaatacatgttttacttcatatgcttagcatgtttcatggtgagtatacttaatatctactctcgcagcaatttttaggaatacaatacattgttataaactaggttgtacaatagatctcctgaacttatttttcctatctaactgaaattttgtgtcctttgaccaacatcttcccaacccctgccccacagcccctggtaaacaccattctactctctacttctatgaattcaactttttagattccatgtgttagtgagatcatgtggtacttatctttctgtgcctggcttatttcacttaatatcctccagatttacacatgctgtctcaatgacaaaatttccttctttttaaaggatgaaaaaggatgacaatgaaatgctagcatttcatagtcagaacttatgtgttaacatttctagtactaatgacatacttcacataaaggattactttacatcttggttcactggaatgagtgcagtaagtaaattttaatgccaagtagcaaatgaatcttttgaaggagctgccactttatatgtgttattacaaagtattattgactttaaatgctgcgtttcattcactttctggatgtggcaaaggatatgaagtcagatcaacttaatgtgcgggacttttacatttgtctctaatgtctgagaaggaaagtgatattctactttatcccatgcaccacaatgtaaacaaatatttttaacatacacggaatagtaaaaatcattatatggtatttttctgtttaatttatattgtggatacatgactcatttcagcagagacttatttagctctctgcatactttaatatcagcaacattcagttaaaaggtatcaggtttctttactgagaaccaaagcggtaaaccattttgtgtatttgtttaattaccagtgcaccatttgaattgacatgttaatataactttccattggagggaaaatgtaatcttttatttttgtttcttatctaatgaaagctactctgttagatgggctagtttggcaatttgacttaggaaaaagtaatatggaatgaagtttttatatgaacaaggaaaataaattaactttactgctcatctcattggtctgccaaattggaaagacattttaggcctcattctcatgttctaattagtctctggaggacattcatggacaattcactgttcattaatctatcgtcttcctttaactttgatttgttcattatccttttagagtctcaaatatagaaaccaaaaattgatgtgtagtgttaatgtgcttacagatgttgataccacctatccagataagaagtccatcttaatgtacatcacatcactcttccaagttttgcctcaacaagtgagcattgaagccatccaggaagtggaaatgttgccaaggccacctaaagtgactaaagaagaacattttcagttacatcatcaaatgcactattctcaacaggtaaagtgtgtaaaggacagctactattcaagatgttttctgttttatatgcatttttaggtattacgtgcacatatatatataacttatatgtatatacacgtgtatatatacaaagcctaatgtatgtatatgtacaaaaagagacagactaaaccttttcaattttgcttcattgactacaatattcatttcaaaacatattttaaaaatactattcatatgtaccatatcataggaatatagaacataatatattaaatttccattgtgtaacacacaatgaaatgaaaggcaaacttacgtacatattaaactctaaaatcttcatcaactagaacaaagagctagagaaagattaaaggcaaatacagtttttaatcattaaaaaatactttatgacaatatgatgtacaaagtcagattttgattattcaggataacaattttgaaaatagaaaagtgttttaaactatttcaaataaacaataaagaaaaacatgatgaaattcttcgttacataattgtatagaatttagtggggttcttccatgacattggcttgttctttctctcaacagtgggtggtttggatgttttcctatgctttctcaggcacaaacaacagtgaagaaacctttagcaacatttctgctgaatgtgtggagagctcttaggccaaactctctcactttgctgagctagctctgtattagcttatgaaatttttagtcctttccagggtatggacctgatgaattctgtttttatttactttggatttagagaaaattgcttatggatgcctgtttttgccggattgaagagtaccatcccatataaatgttggagttgtgttactttggaatcctcatggctaaatagcatgctcatatcttcccagatcatttactctccaacatgatattaagtgccttcattctgggagtataccaatttcgaatatcatttatatatgtttagtattaaacattgaatctcaccatttccatttaatgttctgttttctaccatgttggaaagtagtcctttcgggttacttatggtttttccccctcctctctatccactcccccaaacccttctctgcagatcacggtcagtctagcacagggatatgagagaacttcttcccctaagcctcgattcaagagctatgcctacacacaggctgcttatgtcaccacctctgaccctacacggagcccatttccttcacaggtctgtcaacatttactctctgttgtacaaaccagagaactgcttccaagataatctaacactgcttttacttgcttgaatttttcagtgccttttatctcctcgtgaagagctggtttgtttttccaagttttattgattccctcatgtgattctgctttgttattgagtcttctctaggtttactatacgttgattcttcataaatatgaattcccgtaatggtttctactttcattatgtaataacctctaaggttctctttgacaaaggctgctaatggttataaaaaacatgaggctcatgaaaagttttatatatgtaacttcgaaaagtgtaggtacatctgtgaaaattgctaattacactatttggggagatttttctggatctacgtaaaggaaatacatacattctaagtgaattattttatctattcattctaaaatatatattctatgtaagaaaaatataactgcaagcttcttcatatgctctcctttaattttgctaatttaaacttgtgtatagcaggctctgtagtatttataagaaaaagtcacactgaaaccaggtcatattctcggcaatgtttagtactttctatatgaggaagactcagtggagttttccaccctttcaatattgtatggaacccaatatacaagaaatagccttataaatgttacagcgtgggaatgaaatgtgctaggattgctagatttgcaagaattactttttaacaaaaatgatttattttgctcaatggagccaattcgaaacgtgctagaggatgtgatttttatcaaaactacactatgaatgggagtttaaaaatgatagacctgatcctatcggctaaaaaatgtgtacatttttggagactcaattttttgttaagatagtggtgtgcatttaattagtaatttatttggcagttaatcgatgcattagctgaaaattctaagctttgaaatagttatgacctccatccttggctagtttacttgcaaagctctcttctcactctctctcattctggacctcttgactctccatcgactctctagactcaatttatcaccattccctccgttgaaatcaccaagacttaaggaataagtgccacctcctaagattaaggagcatacaccaagcaaagatataggggtttttttccccctctcattatcactttattgagctgccttttctaggttttctccaatgcctattctggtagcacattttcacctcatcaccaccttcattaaggcatcgctcaggtatgactccttaatgaagtaattacaaatggacttacatcttgctaggctctgctcattctacctttgtgtaaatattaccaaatacataatatgtcataaatcacagataattcaacaaattcacttacttgttttatttaaaataagccattcaaataaatgtaatgtttatcatttaaaaaagacacagcacaaatcacaagagatgggggatggggaatgatatattctgtcactaaaggaagcatatcagaagatgatgttacatgtagttaggtttgataagtgtatgccttaattattcacactaagaacatttatttcaaaagtgtcaaaaggactgagctttcactgcccctacaggctgtacctgctctacttcaaaggaactcaagacaggctggatctgattccatcagaaagctttattaaagtgtttacttgctggtctacagagaaaaataacgttctctataagaggagagagccatgtgggtgactgtcccctatggaaaacacgtgcatgccctcactccccagacacatcactctgctttaacttcatttatttattcaacaaataagtattcttaatcacagagacaaatggcttttattcagctctcctaactttctaccactgatgaaacatttttctcagcctctacactcagcgggttcttcctctctgactattctgtgtctttcattacctggctctttctgttcttccaacttctttagcttatgaaactcatgggaaatatcttggcattcttatctctgtacttgttcttttatcaacataatttaataataatttaataacctggcttcaatctgtattcaatctgtatgcaaatgatcattgtatctctgtcttcaccacttccaatcttacttgagttatagccacatttccaattaattttcaactctttgtatgtatctataccttgatatccactaatatctcaaacctagtatgtctccaagtgaagtttattatgaagtttcttgtccattttttaatgttattcagagccctaataatacaatttttttcgcttaattttgtccatataacaaggctactctcctaaactgcctcgaaaagatttatgatatattaatattttatatttttatgctcattacacacgtatttcatgttccttcaaccaaattacatcactcgttctcccacacaggtgccccaaaattttccatattagcttttatgcttcccttagctcagagtgcttttgtctctgttttaaattggccaacttaatttgtatttctaggcctaattagtaagtggcagaacctgaattcaaatttgcatttattcaactccatgcccatgctcattatagtagggtgacgctgcactttctcgacggtgattcttatatattgcgttacgcacacatagagcagtattcatacatttgattatttagcgcttgtgtttgaatcacctattatgtgccaggtactgttattgaagcaagtgacacataaacatgcaaaacaatctgtgtctgaaagtattctaattttattatcctcctgctgtcttccctcatgccatacgtttttaactcatttaataaatggtaaggccgggcgtggtggctcatgcctgtactcccagtactttgggaggccaaggtgggtggatcacctgaggtcagagttcgagaccaaccgaaccaacatggtaaaaccccatctctactaaaaatacaaaattagctgggtgtggtggcgcacacctgtaatcccagctactcgggaggctgaggcaggagaatcacttgaacccgggaggtggaggttgcagtgagttgaaatcatgccattgcactacagcatgggcaacaagagtgaaactctgtctcaaaaatacataaataaaaaaaataaatggtatgatatgagccttttaattttatctgtgagcttttctgtttcatgatcctctagcatagcatatctggtagcagaattggaggccaatatttcatcaaagtcatttccctcctgatgcagtagatgtgacttatgaaataattagagaaatcaaggattaccgtgaggtttcttacttaagcaactggccaaatagagttgccacaaaccaagatgggtgagactgtagaaggaacaggtttgggagtgaacgttaggatttcagttttaaacatattaatcttgaggtgcctatgaggctatgaatgcatgtaaagaaggggttctaagatcagagttgaggataataatttagaagtcaacacatagatgttatttaaatccatcggccaggataagattgccaaggaaaaatgtgtagacagatgagatctctagatgtatatatgatgaggcatcagcaaaggggctgaaaaaggtggctagaaaggggagagaaaaaggagaagatagatgtggcattctggaatccagaagaaagtgttttcagagaaaggaagatacctaactacattaaatattgctgatgagttcaaataacatgatgattgaaaattattcagtgaatttaggaaaacagtagggtacgatgtctgggaaatcctaatatatagcagttactacagtggaattactaacactcctattcactcttaaaactttcccattttgaccgataaagttacatgctctctctagtttatatcccctttaataagaacaatttcagtggtgtgtgcatgtgtgtgtatttggaggtgttgctgattagagtaggttcaaacgacagtaaaagtgaaggctaccctcattgtaacacttaaaaaaacaaactacaccgcgagctgggtgtagtggctcatgcctgtaatcccgcctcttttggaggatgacgcggggagatcacttgaggctaggagtttgagaccagcctggccaacatggcaaaatgctgtttctactgaaaacacaaaaattaagcgagtgtggtggcacacacctgtaatcccagctacttgggaagctgaggcatgaggattgcttgaagccaggaggtggaggttgcagtgagctgagatcggccactgcactccagcctgggtgacagggcaagactcggtctcaaaacactaccctgaatagttgatggccacagggacaaaaacatacttcttttaaattaacccatcctgataactaatcatgtgtctatatgtattagttcgatttttgatgcaacaactacaaacctagtgcccctaatcaacacatattcattattttacagttctttagttcagatgtttaaaacaggtctcattcagctaacattaacatatcagcagggctgccttccttttggaggctgtagaggagaatccatttccatgccttttctagcttctagaggctgaccacattcactggctcattgccccctttcaacttcaaagctaacaagggcaaattgagtctttctcatatgacatcactcttacctatactcttctgcccccctacatctacttttaagagccttcattattacttacttgctatgtgaccttcagagaatttcttgaactctgggcctcagtttcctcatgtgtattattgaaactgtttctaactcatatagttattaggagtgttaaatgagattaattttataaagaacattgcatggtataagcacattgtaagttctcaaaacccggcaaccaatatgattactactttagatacatcaggggttagataagattttgtggtctgatctgagaaaatttttatgtttttattagcacttttatgagaagagatagcctggattctgatttataaacaaactcacaacctgtatagagttcggcaagttaatataccgagtaaaagattctaaggaaaaggatatccttttttgttctgaggttgctgaggaacaatcttggaaccatgcagagcagaacatagtaatgccttttataaagcagaaaaagcacttctgggtgattttacatccagcaatcctgtgttgggaggggatgaggcagaggagatttttcactctatctctgcctttgccccctcctggcacaacttgtccctcagactgtccacatattgtagaaagtaattggcaaacagaggatgggaagccagccagggagaccactccttagattaaaagtatcactaatttgcttcgaggaagcctttatacatcctgatgtgactgaacaaattacccagaaacagaattgttaggttttagctcaactctataaattggtacactgaagacttctgagtagaattttaaaactggaaggaaccttgaagtgaatatatgtgatgatgttattttcaacagttacactcttatcgtttaacttcttttgaaatttactttattgtgtgtaagaacacttaacatgggattcaccctcttaactgatttttaagtgtaaaatacagcattgttcagtataggtacaagttgtacaacagatcttgagaattttctcatctttcatagctgaaccttcgttaattagcagcttcccacttcctcctctccacagcctctagcaactactatttcactctctgatttgatcagcttgagtattttacatacctcttataagtagaatcatggagtgtttgtccttatgtgactgtcttatttcacttcccataatgtccttagggttcatccatgttgttaatgtggcaggatctctttctttttgaatattaatagtaatctcttgtatgtatataccacattttctttatcccctcatccatcagtggacactgaggatgtttccacatcttggctcttgtgaatggtgttgcaatgaacatggcattgcaggtatcccttcaagatcctgatttcaattcttttggataaatatccaaaagtgagattgctagatcaagtgggagttctgtttttaatttttgaggagcaactatattattttccataatagccatgccattttttacttcaccaacggtgtacaatagttccaattattccacatccttactaatccattttttaatagtaggcatccaacaggtataaatgtgatagctcattctgcttttcatttacatttccctgataattcataatgttgaacatattttcatacacctgttgaccatttgggtgtcgtctttggagaaatgtctgttcaagcctttagcccatttttaattgcgtttttagtttttttttttttgccaatgagttgtaggaattctttatatattttagaagataaccagttgttaatataatataaggtcttcaggtctgatcacaaaatcttacctaagccctgatgtatttaaaatagtaatcatgatattggttgctgtctttttgataacttagaatgtagctataccatgaagtattctttatataattcattttatttaaccctcctaatagctctgagttagaaataattctcataatatatatatatggtttgtattttcccattccatagattgccttttcacagtgttgatttgttcccttttctaaacagaagatttttagttttatgtagtcttaattctattttttttgcttttattgcttgtgcttttggaaataattgcgaggatgaatgtcacaagatttttccaatgttttcttctaggagttttatggattgaggttttacatttacatattttatccgtttggagttgatatttgcatatggcataagataagcaccaatttcattattttgcacgtggatatccagtttttccaacaccatttgttgaagagattatcctttcctccttgtgtatgcttggctctatcgtggaacatcagttaaccctatatgtgtagatttatatctgggctctattctgttctattggtctatatgtctgtcttcatgacaatacaatttatttttaattactgtagtttagtaatatattttgaaatcaggaagtgtgatacctccaattttgtacttctttctcaaggttgatttagccatttgggattctttgtggttccatatgaatttcagagtttttctctgtttctgtgaaaaatgccattggaattttgataaagattatattagttctgtagatttctttgaatgtaatgacaattttaagtccttcgatccatgaatgtaggatgtctttccatttgattttgtcatctttaatttctttcatcaatgttttatagttttcagtacatactctttgacctctttagtttattactgttttctttttggtgctcttgtgaatggaatttgtctcctagaaactcaactaatttttgtatgatgattttgtatcctacaactttactgatttttaaattggttctagtgtttttaatggattctagggttttctattcataagattatgtcatctgcaaataggaataacattcttcatttctgatttatatacctttacttttttttttttgcctaattattctagcaaggacttccagtattgccatcggtagaagtggcaagaatgggcatacttaccttgttcctcctgttcctgatttcatagaaaatcctttcagttcgcagttgttgtgatatgacctgcgatctttttatatatggcttttacattgaagcaatttccttctattcctagtttgttgagagtttaatggttttttttaaatagtgaaattgtgttgaattttgccaaacaagttttcagcatctaatgaaatgaacatgtgacttcttatttattctgttaacgtggtgtatcatactaattgattttcatgttgaaccatccttgtatcccaaggataaatctcacttggtcatggtatatgatccttttaatgtgttgttaaaatttgccagaattttgttgagaattttgcctctatatctgtcaaggatattgagttgcagttttcttgggatgtctttttctggctttggtaatgctgaccttataaagtgaatttggaagtgctccctccacttcagttttttcaaagagttcgtgaagcattggcattaattttctttaaaaaatgtttgatagaaatcacttatgaagtcacctcgtcttttgcttttctttgttgagagtttaaaaattacttactcaatcccttacttgtattgatctattcagacttttccatttttacacagttcagatttggtaggttttatgtttctaggaatttaaccatgtttttagattacagtttcttggtgtaaaattgttcatagtggtctctttatgaagattaaaggagcgttattgtgttatagtccaaaaacctagaggtttttaaaaaaatgatttagtgtaagtaacttaaaaacaaaaagttatttaaggtaaagccctcattaagtatgaaaattttataaggatagtataaccaaaatacatcatttattccactaggtgtgtctgcatttaggaaatatgttaaatgcctagcatgtaatttacatttattatttctgatcttcaaaaaaatcttacaaagatgtaactccacaaatggagttacctatcaaaataggttaggaaattgatgcttaaaaaaagctttgaatagtgtgggaatgttatttttcttcttgacatataagtgataattctaaataagaataggaaattttctgtcatccatgtcccaaatacatttcctgttttgtcctctgaattattctattcatgtttattttgatgtaaataagaattttaatggtgttaaacttttcgaagaacattaaggaatattccatagctaagatattaagatgaaaacaggagtataataggaatctagtctgtgggacctgcatatgctattttctctctattactcagttttctcatctctaaaataaagatactttcaactttccatggggtggctaaaataattaatgcatagtgtatgtgagaaaagcctccactatcacatagagtgttagaggggaaagactccattcaccttcttacacaacaggcattcaataagtagttaagggtaaagaaatatttacaacaacgtggatcaacactcttccattttgcattatatttataaatgataatgtaatcttaaaaatataagtcaaaaaatgtagaatgaaagtccatttttacatttggtaaagatatttggagtttctggaagagatgatatataattttaccaaccattctagaaaatgacttttttgtctcttgataccagagataggtccagaggtattgctgtggatgttacaaaaatagagtcaatttttgcgaaccaaggatatttgaatgctctcatttaagtcatgtttattacattttatgggatttgtcggttcctagaatttgaatgaattattggatggaatttagctaatctgtgttccggtgtttaagcaggtcagggcggcttatttgtaatcattaatagtttgtttggatctccacatgtaggctagatgcagtatgccttctttaggaagggcctcttaaggaatatctttttcaaacatttattttaatacttttttatttttatgttttattatttttcttttacaaatcaagtctttatggaagtaagaattcgtgttacaactgattgaccttagttgtgtgactcagttatctcttggcatacctgtgtaatgcttagctcacctgtgtaatacaggtgtgcttaccttgttcaccagtaactattgccatatagcaaatcaactcaaaacttgggagcttataaaaacaacattcgtttttcttattatctcttttgattctgggtctcagatgggttcagggcttctcatataggtgtaataaaatagtagatgaagctgaagtcattttgaaggcttcttcactaacatgcctggtggctactgctggaacttcagccagggcagttggctggaacatgtatatgtggccttatttaatctgcagtcactcactaaatgctggctggattccaagagtaagtgacccaaagagtaccaagcagaaactctattgccttttgtgacttagtcttggaagtcacatagtataacttcttccatagtcaggggtccatcctagtcaaggggcagaaacataaacccaactcttgatggagaagtatcagtgttacatccgaagaataacatgtaagatgaaacatattgtatccatcttaaaaaaatacaatctgtcagaacttacaagattcttctgaagaatccaggttagttgggaaatgtggctagcatggtgcctaacaggtgttcaataaagtgcactctacttactgatgactgtacttgttttaggtaagcttgtacagatcttcaaatatccaggctcctgattaagaagtttgagaatgtccttgcacataagtgtcacagagtaggagccgaaatggccacttaattgctttctagcacaaatgaaatttcaaatccatttggaaataatttgtatgtgtaatttaataccaagaatattaagtagacactgaaacctctacacctttcattttacaggtgaagacactcaagctgagatatgctaagtcatgtacctaagattacagagcagaaatatttggtctaggatcctgatatcctgaattttgttaaacatgatgtcttcttaaggattataattattttaagctaattcatcacactgtcacattttctgtagggcgatctctagtttctacattcattaagtaatttgattttcttttttgcattaattttattacaatctattttgttttcagaaaatattttaatatttttaatcttttctctttaaattattaaccttatattttaatgaaactatattcaaagtgttgtaacatcataattaagatacatgacaaccatgattgaaaatgaaaacttagatacatttctttcttttcttttcttttctttttttttttttttttttttttgagatggagtttttgctctgttgccccggctgaagtgcactggcacgatcttggctcaatgcaacctctgcctcctgggttcaagcaactctcctgcctcagcctcctgagtagctggtattacaggtgcctgccaccacacccagctaatttttgtatttttcagtagagacgaggtttccccattttggccaggctggtctcgaactcttgacctcaggtgatccagccgccttggccatccaaagttctgtgattacagatgtgagccattgtgcccggccatacagatatattccttaaaatgtataattagtggatacccatgcctaattttaatccctgctatagaattctggcagcacatatccttgcatattgtggtctttatctacaaataatatcagtgaaaaaatgtaataatgcttggttaatcaacataaacttgttaccaaacttgtagattaacacagagcctcctattatgtcatacatgtgttaaatccatgtgggtctcaaatctactagcaaacttttttgttttcactaagagtttacccccttaagcatgtcaatgtaaagaaaaatattaattcttttgaagagataccttatttagtaataattagagtgactttaaaatcaacacataattaacggtcacatattttgttcattataaagtttaatagaaatacagtcattttttaaattatgagaatgctatcaattaaatctttggggaaataaactatctttggaaggattaatgatgagttgatggtatcgttatgaaactcctcatttctagatcatctgcataccaattcagctacataaagtcatgttcctcttttatgtgtagcaaatccagattttcaagcttagcattttaaatacttacttctattaggtaacttatttaaagtgtaatgatgccaatgatgagaggtatgtataacaatgggattacttcacaataaaacttacttatagtgaatatttatgaaaatgtttattaggtgtctctgggaactctggtcaatttaaaatcttagtacattttatcttcattataacatgtcccaaggaaatttttggctgaaagattagcattataaaaatagaactttaattagaaatttctatattgtgtgtcagattgctaaatccagtggcaattatctgcttcctaagatatgtagtcctctttctgaaacattcaaatttactttataatacctgaaaaagtcatttcaagaagaaatttagatcattaatggaatgagaaataagattagcccgtggattcttctacttctactttataatttaaatttcaggtgagctaggtgattaaagtcattttaactatttggtacctcaaatagttcaggaacaagtatgccggaagcactgtagtattaccattaatttaataattgcttattggccacttgatcctagaagccaggaataaatgtgaaataaagtttttataagctcttaaaaatcttaacatttctattgcttcatagagcatgattatagttaattatttatggagtcaataaaggaatttagtatggcaattcttgcatcatgtattggttatgatgcttttaagaaagactctaaggaaagttagaagtcaaatataaagttgggaaaattattagtaacatttataacatacgaaggattgatagccctcatatataaataatgctgataaatcaataagtaaaactagaatgccccaataggaaaattcataaagaacatgagccagaaaatgacaaaagcgaaaaagcccatatatcattaagtatgtaaaaagacataccatctacttaataaaaaaatataatataaacaatcaaattatttttaactaccagataggcagattgaaacagtgataatactgataattttgcagaacataaagaaacaggaaacatcaaaagttgtaagagggcttatgacagaataaattgatgctgtccttctggtgcataattttttaatcacaaaatttaaatttaggagtaataatctggtaaatgaaatgatgtaagacatagttaaaacaggttttcaaagagggaaagtttaataaacacttgaatagtgatcaccataggattaataaaacttagggtaaatatttttaatgcaatatcatgaaatctttaaaattcatgctatagttatatacttaataccatgctgtaaagatagcactgatacatggttagattataagcaaagttttcaaatagagtatatatctgtgtgttacgtgtgcatatatatgtgtgtgtgtgggtatatacatacagcaatacacatatctaccaataatactaaacacttacatagggagtatgttctattcgaagttatacatatgggttgtctctaacagcactttatctctgtgcctatttccctagtctcatcctcataactagaactctaaatccattatgtatacacactgtgtgtgtgtgtgtgtgtgtgtgtgtgtgtgtgtgtatgtatgtgtgtgtgtgtgtgttttgtatgtgctataacatttcacttttgcttctatggtgcaatttttttcattggaaatttaacaacttactatttttaccgtcttaatttttaaacaaataagtcattattactcagtggcccttgaaatattgaggcaatatgtctcaaaaacttcttgttaggtgaatggttacattcactccttctttctttctttttttttttattatacttttagggtacatgtgcacaatgtgcaggttagttacatatgtatacatgtgccatgttggtgtgctgcacccattaactcatcatttaacattaggtatatctcctaatgctatcccttccccctccccccaccccactacgggacccagtgtgtgatgttccccttcctgtgtccatgtgttctcattgttcgattcccacctatgagtgagaacatgcggtgtttggttttttgtccttgcgatagtttgctgagaatgatggtttccagcttcatccatgtccctacaaaggacatgaactcatccttttttatggctgcatagtattccatggtgtatatgtggcacattttcttaatccagtctatcattgttggacatttgggttgattccaagtctttgctattgtgagtagtgccacaataagcatacgtgtacatgtatctttatagcagcatgatttataatcctttgggtatatacccagtaatgtgatggctgggtcaagtggtatttctagttctagatccctgaggaatcgccactccttctttcaatagaaaattattgagtaattagtatgtcctagaaactaccataaagctctttaccatgataacccaattgtggtttggagatttactaatgtatcacaatatgcaggttaaagactgctgttagaatgtgttactagtcacttaatgtttattaagtgccatctaaaccagtcattctagatctggttattaaatttcactatgttataataactttttcattccaatgtgcactgtgaatcagcaagggaacgctattcattgtggtcatttggaaacccagcctgatgaaacagctactatctaggatactcccagtcactccgcaaagggaaagaaaattctgaaaggtcttgtgctggcaattaattgcttgaactggaagtgacatatctgcttcagttcacaactcacgagcacaactagttacatggtctcacccaacttagaactaagaaatatattcgtattacatgtctcaaaggtagaaagctggaaataaatatgaatggtgttaataactgctacactgctaaatttatgttgtcagaaacatctaaggacaaaatgaactatgaaataaaaacatggccatgctctcaaaatttgttttttttgatatgaactcttcaagcataaaaaattaaattccaaaattgaaatcataaactaagttaacttgctaaaattcatggggtcaaatatgtgatatttgaatactcgctaatagaaatgtctcaaaatgcaataaaaggctttgggggatagtgagccctctgtcagagtagtgtttaagtatagactacctaatgagactggttgtaaaaggcagtcggtcacgggacacatggcttattaatatgttcacttactatgtactggaaccatatagctgtctaagatgagctttcttctcctttgcaagccttaaatccataattctaatcgatgggtcttgtggaatagtggtaactattatggaatgagagacagtgaaccaagcatggggaacatatatggccatattattgcccttaaggaatttacaaactgagtaagtagagaagatgttgagagtagttctaaatcctgaaataatttcactttacactcggaagaaaatccaaaacaccatcgtgatttgttccctataggtatcctaccttctttcctacccttaaccccatttctcagctccagatacactggcctactagcttggcatcaaatacgccaagcatactttgagttcagtgactttacacatgtatctccctcttcctggaagggtttttcccccagttattcatatggcgcacttcctttaccttagactgcaaagagatcttttctgactaccctatttgatatgccactaccattgttctgtcttctttcaaagctttaatttttttcctcattgtagttatcactactgacattacgatatttgcaggtcgtttttccctaatgagtaaaaactccaagaggaaaaggactagaatatatactaggtacataaagcatattgatcaaatgaatgaaagcatcacgtttcttttatatgccccagtttgcgattgtattgtatattctaagagttgagtgaacagcaatacttaagggagcagctgcccgtgaatctaatatattgttcagggttttgaagcaggtcctgcaatataaaccctgctgcagcacagttttacgtcatcttccttctcttactatgaattattaatcccatcaacctcatcgtaatagaagagttacgtataaaagaatgagtaatacaaggtgggatatgctaccttgtatttcaaacacatgtttgatttttccaaactaatttcagtgattggagagatcgtacaaatatggatatataaggcttattactagcgtgatgaatgggatccaagaatcggcagtttatgcatcctacaatggtccatcgactcgtactcaggaagatttccatagagtaagttcatcttgaacagagctttttacgaggcttagataagaaaagaatgaaaatactttaggtgggacatgatttcaataaatggtattactaaagccatggaaataaccctatgcttaagagatggacgaaacagatattttggaatctttgctgctctaagattctttatcgcctaatagcaaaaagattagataaagaggaaaactatcacttactggtcaaaggtagaaaatgtatggagaagaaatcagtgaaaagtgatgtaaaatatgtaactaggaaataaataaggctagagaaggtaccagaagtagatgagcagctgtggactgttacccccactcccgtctcaaatataaggggcgtagcctgagggttttctgttcaaaacaactttgactgtgtgtgtgtgtgtatgtgtttctgtgtgtgtgtgctggggagaaaggttggggtgggtggaaggagagttgatggggggagagagacagcaaacaatgttgaggctcaaaatgaaatttctatttttaagtacattttgaaaatattggcttatataaagttttcactaatttttgaagtaatattaaatatatgagtcttttaacaaatattgggcattcataatttgagatgtaatacctaattttgaatgaaataattgtttttctcaataaattaaagcataagaattattggagatttttcaccattccatgagaggaaattttagtagtgtacaaaagtagattaagatttatagacagcctttggcttggagaaacttactctactcagtgcctgaggaccagttgtgaagacagtcttatttgtgttggacaaaaacgtcaggcctttgaaaaaaacaatattcaaagtcagtattttgattgtatttgaagttcttagtgatgtttctaaacgttacgttaaatattagaaaaatattttcatggtcatatgtgtcatggtcataatcaatatgatagcttagttttttaagagtacaaaaatttaggccaggcacggtggctcatgcctgtaatcccagcactctgggaggccgaagcaggcggatcatgagttcaggagttcgagaccagcctgaccaacatggtgaagccccgtctcaagtaaaaatacaaaaatcagccaggtgtggtggcacatgcctgtattcccagctactcagaggctgaggcaggagaatcgcttgaaccccagaggcggaggttgcagtgagccgagatcgcgccactgcactccagcctgggtgacagagtaagactccgtctcaaaaaaaaaaaaaaaaaaaaaaaaaaaaaagtacaaatattagagcgaaacgaacatcaacaatttagtgaacgtttcttgtgtcagtttcagtctcagtatactgtgaaaagggaatgaaaaaaacatgtttaaagtgagtaaaattgattgacgtggtctttttcagcatgttttaagtgtttttcgctttgccaattaaaacttctattttattatttacctaaatctaccccccagtaaacaaaatagtatttccattttcataaaaggcagttccttttctttttcatcacccccatctttagagatctttgactttctattttttctcactgcctgacattaagattccttctgttaaatgtttttgaattacatttagttcataagaaatgtttcccctagactttaagaactttcggacataaaatttttcgccaattttgttcattcacttaacaaggacaaaaaaccagaaagagttgggtgacaatttccattcagtaaatgttctttactaaatctgaattgcatattgtggaatcagtaaatgtcaagaacaagccagtctatcttttcacaaaaaaaaaaaccaaaacctcgttgttactattttctattgtttttctagtttctattttatttacttttgttctgatctttattctttccttctattaacttcccctgtggaataactccaattataccatatcatgaagcaaaacatataactgtagaaatacaaaaggctcaactataacactggactaagcattggctgatctcccctagcatacctagcaatattaatcactcagataattaggcactgtcctatatttttgtaagatttataactttaaatttttcattacatatttttttccagtgactttgagacttatcttactttttagtgtgttaggtttatcagtggtgattttattgttatacatgacctcataatagttgttttttctttcagtacatttgttttatgtttaaatttttatatttacatgattaacttatgcaaattatatgtttaaaaatctgttttattgccaaagttgtaaggagggagtcaaagttcctagtcatttatttattagaattattcacaggagtgacaacgtgcgtaagtttatgttgaccagtcaaattttctcttcacaaaggacagaatgtgaaaagcacagattcttttttggtcatggggcagggaaagataatataactctgactgtgagagaatgagggaggagtagagaagggatcacatgttagtgtttattcttgtttcgtagaatgtactcatattggcctggacagttgccctttgattttaggagattaaaatatactaagcatgtaggcacccacccatacacacatacacaacacaacacacacacacacacacacacggacacgcaaacacagttgctaatcagtctgacttttatctgtaattctggttctgctacttactaaatgtgtgacttaaggtatattactgcacattgtgctcacttttgtctatttggatattttagttgacatttcaccttacataaaaaatgtgttgaaaattgttagcaagaaacaccatagggcatcatcatctgctttgtgatacataaaacatttgttaaaactgttcttttcttctgtaaggacactcaacagatttatcaaataaccattttaagtgtacaatacagtattattagagacaacgttgtgtagcagatctttagaatttattcatcttgcatgatgaaaattttatgcccattaattagcatttccccattttctcctcctttcagcctctaaaagccaccactctaatctctgattctctgagtttggcaattttagatacctggtgtgagtagaatcatgaagtatttgtatttctgtgtctagcttttttcatttacaatataccttcaaggttcatccaacttgtcacatattgcaagttttccttctttttaaagactgaataaaattccattgtatgtatttaccacatcttctttatccattcagctatcgggcatttacgttgttcccacatcgtgactatttttaatcgtgctataatgagcactggagtgctaatagctctttgagatcctgatattttgctctttttttgataaaatggcttcataatagttatttcctcatatcattattctaaaaattgagctgctaagtataaatctgatcacaaagtaaacatgtaaatattattttttaatcacacatgaaggatttttatagtaactttgtgtaaaggtgggtattttcttgtaagttattggaatctattaattttaagggagcattccaaattttaagaggtagaaagaaacaaaattccagtgcctatgtagtttatttcattttaatttaaattatgagatgattgaatagtgttcacattagaagtataggaagatagtttagaggtcaacttctttggtcttgtatttctttttgttaatgaaattaatgtgtgttcagtggaaatatgcacatgtgaatatactgttagtttctttaaataaattatatctccaaatgatataataccatgaagccactacaaagttaagatataaaagagtttaattgcatggcatatttttacaatacattaaataactgaaaatgtagctaagacaacattgtgactggttttgaaaaaataaattatttgtgtggttatacatctatatatgtacttagaacaaaggttatattcagaatattttacactagactcttttcaattaattttataggagtttcatttctctgaattttcatttgtcagtgaaattacatattttaaaacatgcaaaaataaataaaacatgtaatttaaaaatgtaaaactcttttacatatatttttaaatgtcaataaatgaaaaactcttacatatatttttcaatttcaataaatgaaaatcaggaaaatagtgacatggtcttcaaaaatcacaatttaatagagaaaactgaagataggaaataatattctaattacggacaatgattaacactggcagaactggtaaatagtacactataaaataaaatactacattaagatatataatcagaggacatcatacctcaatacatatgtgtttgttttgttttttaaagacacgggctaacattactaattactgaaggatggagaatgttaactgagcttgtaatgataagccggtgcagataaataaaatggtataacaatcatcacagtttataaaaccctaagagtttgttaaatgtgcataatagcgtccacaatcccgctaacacaatctccaaacatttttgtgtacacatagtgtaaaggatccagaatttcaatcatattctcaaaagaattcattgccccaaaatggcaatgaaattctgagaaaaatagggtatggtgagactctgaggacttggaaagccaggcaaaatactacttatttctatggtacagacagataagtcctttatgttatattatccatgttgaaaatctggtagattgggaagcaggaaagaggtttcatgtttcagctgcaaactttgtgttcgtggaaagacaagagcaagtgctacataagttgagccattcccagaacaggtagtgaaagggctctattgcttcaactgaagaatgtgttatgctcttatgtataagagggattcttcacaccttataaaatgttcatatcccttttacgtgctttgtattatttatgccccagtgagcttacttgtgagataaaagatgaaatttttaactctgtcaactaaaaacaaccttatatatcttgaatgagttgaccaaagtagtatggttagaaactgataggtatgtcactcaacccaagttttccaatttctgggctctgaatcattttattagcctaagctccttcctgagtgttgatcttagataatgaaccagttactcttagataatgtctgtgatgatgaataatgtcacaaaaattactaactgatattggacaatcattatataacaaacattgctgtaaacacttttcatacattaattcaatgtttataacaaccctattgagaagattctgttaatatatccattttacacttgagaaaattgataagctggttaagaaatctgtgcacagttatgcacatgaaaagcagctgtgccaggatttgaacacacacacaatctcattccagaattgattctattaacctgtatgctaaaatgacacaacatagagctttatgaagctatcattagaggaaaggttgggttttcataaacacacttatgcacacacttcatgatttactaaaagtggatgaatatataagcaatataatgacaaattataaatcaggcaaccagaaaataagaaggtaaaatacaggcaggtttaaaataaaggttactttataaaatgaaaggtgaagtttgggaactggtaatgaggaagaataattgctgtgaaatctatcaacagatgacttcattaatcttttttccttgaaagagattcagatgatattaccatctctttcaggagtggaagagagagaattggagagaaatgttttaaagattctgatttatagcaagcctgtgaaaaaatggtgcattaaattcccatttggcatcctagttgtagtaagataatacatcctttctaaaaattccatttgatgaataagcaaaccaattcaaaatgactccattttattgataatagcatcagtgtcattaatgagaatgctttttgactaacagcaattaactagatttggtgaactgagcaattgaacattgaatttgaaatcagaacattcggcactgaagatgatataagtacatattagaatgattgttgattatttaaggatttattaagttgatgaagaacattaaagtctattatatcctgtattatttaggatgcttggtttcaaatgtactcaagatacaaagagaatttgttggctaagtaaagagttcaaggtttgctcaagggtttaatacagagttttattatggatttaaggagaagtctttgcttctctgttaatctaagcctaccctccataacttttcgaactcatacagaccggcttccctcagcagatcttggaaactcttttcccttgtttacagctaaatgtaaagaatatatctttacccaaataggaaacaaaaggtctgagtttctctctgcttggaaactcttagatcatatgcctggcctgaacacctccctgaagcaaagtacatagcagtatcccacttggcttgcacaaaaaccgagcgcatatctagaactgagagtaataacaatgctttccaaatcaccaggctactgtgccatcagagagtagaagaaaggatattgactgtataattgcagtgcttactacagtcctcctctttgaatatccaacattgctatacacccttcatagcatatattcactttcaaagatgctcagactcctcaaaaagagcaagtataaaacattatccagtgattgcattcagctccaaggttgggatatctgggtgattagcagtccctttcaattagtctttatgatccatccagtggactatgactaagtgaaaaaatttgatgtccagtactgctaagtaaaaagttagaagggcacatcctgattaaaactaaactaaatttataaaagaaaccaaattgaaacagatattatatcctgcactttcagagccttcctggtgatttttccttctgttcattataaattttgctaaatacttgtcttcatcatgatatctgaagttgacatattttggggttttgtgttactttattattctacttattgtgttgtttaaaagtcctggtgcttgccctaggtttgagtgataacaaggtgtttttagttagacctggggtttctttggcaatcagatttgtttactatttataggctttcagtatttgttcttatcaattccatgacccagtaacccaaattctatgatttggttttaggcttcaaatgttaacctcttttgacatctttaagaggcctctgtgctttgcacaatcccctgactgagaaaatttgcagcacagggttggggtagagggcatagccaatctttgagtatatctttgaagtatagattacatagaagctgcttcttcatgataggagggatcgtctactttgtcacaaaagtgctttagggaagcactatagttgattttttttagtacttaagtcttacattctgcctctcctgtctctgttcatacaaacattcgatttggagtaaaaatacaaattggcttttccactcatatcaggctccaaattatcagcctctcaaggcgttcacgttataagccacaggcagagagggcttcttcagacaaagctatattttcttttttttctgtacttcaaaaacaagtaaccattagcatgaggttttttctttcttggtttaaagaggccagtaggtggcaacatttttgtttctatcaaatctcctaatagtgttggtactcgtaaggcacatgacttaggataaaatagaccattgtttaatcaactgttttttaatcatgtaccaagtatcattttgagttggggtgggggaggtttatcatccttgtcttctcataattcagcctgttccacattataggatctattaactttcaacaacccacttcctgataccaaagtccatataaactagaatgatgtttggtacaataatggaaaactcttctcaagaaaacttgaaatatgcagacacacacacgcacatgcacacacatacacatacacacacatacagaaaacatccacattggagcagtaacatgtgacatcttttcttccattaaagatttcttgtaattaaaccttgggaattattggcttatgtaacagaaaattccaaaggaatggcaggattctggtaagcctttaatccaaatattcacattgtcatcacactgcagctccgtatctcagtggctcttttggctcttcactcttccgttatctatgccaggtagttatttctttccctatacagttttgttatgatagatggctgccagaactgtaacatttttttctttgcttatgtcaaaggaaaaataagtactttttttctcagtcaagcagaactctggacaccttctggttggaacatgttaagtcatgtttccacagttaatatactgtgttaaagcataaaatgttgtagttggatttttgttctatgtccctggcaaaaaggatttatttaaagcaatcaggacttatgcatgggattggggaggtgattaattgctcccaagccacaagattccttcataaggatggaatatagtttggaaattattttatggtagtatttgaaagagttcagtgttttcccatgatttaataatataaatccttaatagaataaaatatatcatgaattgcaagtgtatttgaaagtgtgtgtgtgtctaattttattggatccagaaaatatgctctattttttcttggaaaatgctgtgttttatatccactgcattttttttatgttctgtacatttcagttggatttctttcaaagggactgccctctatcaatcaaagtcatctttagcataggttaggctattactgatgaatcaaatatttctagagcaatactttaggacctgtcccacaactaatatattcaaaatttagcaaaagtttattgagtacctgttagaagcaaaggactatgctaggtgttctcatatacatgaagataaatatatgtcataaaacaatgacaaattggctttcagaatgtgcttatttccaatatcatcatatttttcttttctgtcatttttcattttatcatataaagaccttgaggggtgttttttcagagaaacaataaaccaatgatggatgagcccacttgagttagttacatactatacagcttatataaagcataagcatataaaaagtatatgcatctactttcatagtttggattgttatttaaatttggtggtattacattttcttctcacagatgactggtcttaaatgtgtactatagaatttacagaaacaaaccatagggtttaataagctgaataaaatgaagctctttatctggttagattactttgtaaaggacaagaataggggagcctcccaggtcaacctgatgtatgattttccatttttctaaataagttttattgacttttacattttaatggaaaatgagtaattagcagaggtgcagattatatttggcagaaaatgattataatatttttatcagagagtaaaatatatgcagaaatagccaagtaatctgatttgttaataataatagtatcctgattatggttttatcttttgttttaaaataacatttatatagggtcaattttgaagataaatgggaacctggtgaactctgtctctttttctcagagtgtgtgtgtgtatgtacataaatttaaaaatcgaagttatagttaattggaataagaagtttgttgaaaacagtttgatgtctggtaattgagaaatgtttatgaatctgacataatttactaaataatggagagagatacattattcagaacattatataagtacctaggccaaatttctgaaagatccaaggtgagagatatatgtataattatcttggtggtaatttactcatgagtagtattgacattgagatattaacaatttgtaccgacccacttgtagctgagtatatattcttaaattgtgttccaacataaactgtcatctatattggtggatctttgcgatgctttgggttaggtcatcaaaacctaagcaaaccctggggaatgtactttatatgtatattattctcccactcacacacacacacacatcctcactgtttagaagtacacatttgtcaacattacaatgcttttggcattcacagaatctgttcaaattagtacagtgttcactactgccatagcaggaaaaaaactgtacttttgaatcatttatttttaaatcatttgaagtagaaaattctgacaggttgcactgatgaatctttactaaaaataaaggtctttgtttacaaataattacatcttctcaaccagtggtttcatgttgcttactttcttaaaattccaaatagaacaaggtttgcaaaaatcgtcacatatacatgttatcactgttgactgttttatgataatttaggtagcattcattgtacacttacaatatggcaggagcatgtggcagttacttgaatggcaatatttatgaggtttaccaccaatcaagcttcccactatacagattaagattaagacttactgaagggtccttgtgctagtaagaggcagagtaaaatagacctaggcatcttgaattcctaaacctatgatttctaagttatgtcttctggcctttgtgttaaaatttatttctaatcaacagtgatacttttaaaatatacataatagtgtcatatgtgaaggtcaaacactagtaatttaatctgtcaagtacttactgatcatctaatttgtgttaattactgggtgttacttgacttgtcctcaggttctttatgcactagagaggagacagacactcttacagctgctttaagacacagtagagataggaagtataataacttttcatataaatcctctgggaccataaattatagcttcataaatcttggcttagcaggtagcagaaggtataactgaatgatgagccttgatagtcaagtatgatttttataaggagatcatcccatagaaatattacttcactttgtggagctaaatgagaaagaagcacgaatcgtcagttcattttgtgactgttcgtttcgtgtgtagggcatatggttaggggaggaggagtaggagaggcggctggaaaatgaggttgaaggacacattgtggaggattttgcatatcatgctcaaggagatacattttattcagtaggcaagagaagggcattggcaggttttgaataacaagtcatgtgtttcaaccctgggacttatgaagctgaatggagaggcactttgcctttaggaaggattgccaaaaaaaaccaaaaagggccatgctgagttgaaagtgtcaaggttgcctccagaataagctaactgtatttggaaatcagggtttattatcaacagatcagttaagaccagtgatagaatcgcattgcaggggctagggtggagagagataacagagtaatcccaaaaagtacatgaaatttcacagagaaaaaaagtacaatcaaatttgaagaggttcaaggacagaatatttgattgattgttttgttgatcgatctatctatctgtagggaactagaggtgggagacatagttaggtacgatttaagagtttccttaggaaagtaccatcacataacagatatttaaaaagactttaaagaaggtagttatgttaaacagtgctgcaaatgaattgaggaggatgcaggtaggggaagggcaactggatctactgttttagaagtatacttgtgtgctgtgagagggatttttaagtataagtgtggaaaacaagaaataatacatagaattacggctgattatgggaaactggaaggaggaaagtttaatcaattctgaggttcagtgatgaaagtaaggaggagatgggatagttcatagaagaatgatgttaatatttcagattgggagagaattaagagttctgataaactcctaattttgatgatacactctgtggtaggaatctacagtacaccgtaaattcctgtgtataacatacaatgtgctatataaaatatgtggtatcaacctataaatgttgatttttcaggacaaaaatgtccagaaaaatgtaatgaacattcagcatacagcttcgataagaagttttaatcccattagtatttaactaacatactcccatttttagtaagtgattattattagtattgattcctacttaattctcttcaatgccgtagtctctgtattttcctcccttcattaaaaaaaaaaaatctttcaagttcaagttttatcagagagcaagatggcatagggaagagagcagagaccatgacatcactggaacagtttaacatgatttgattttataaaacatgataaaataagtatcaggcggcattttgttttaaaacacttgctgctggaattccactattcatatgataacctgctgatcagtaggactctgtctcctgatgccaagtttttagcaccttctacagcaatgtgtgaataatgcagagatgcgaaggaaccttttaagccaacttgagaaacaagccctgtcaaaaacatgatttctcatgactgaataatgcaacagactattccatttagaaaaacatcagtaaatagtctgagttttgatagtgattacattcttacacttgaggtaaaaaaaatattcttgtctcagtccacaaagttgataggcatagggacatatgagtgtatacactgagggtgtttaacaatgaaatgtgattcaaaaatataacaagatttgataagcaaatgggccagcaatttgaaatgcttcaaattatacttaggctctgagatgaaatgtatgtcatttaagtgtacttttttttttttcccgagatggagtctccctctgtcgccaggctggcatgcagtggcacaatctcggctcactgcaacctccgcctcctgggctcaagcgattcttctgccttagcctcactagtagctgggattacaggcacctgccaccatgcccgactaatttttgtatttttttttttttaaatagtgacaaggttttgctatgttggccaggctggtcttgaactcctgaccttaggtgatccgcccgcctcggcctcccaaagtgctgggattacaggcatgagccacagtgcccagccttaagggtatttttaagtagctcatcaagatgcaattagatttaccattatctgacttgagtagaaaactggaaaaaaaaaaaaaaaaaacacaaaagcagagaatggtgagaacttttaagcgaaggtgtagccgacccagtgtcaaatagacaaaatgtagaaaagacaaatattatacatgtgatcttttctgtcacataatgttgacccctaggatttccatcttatgctttcagtaacagtaaactacaatatttagtgcagtattagatgattatcatgtcctaatacatttcctccataaaactagaagaatggcacttaaggtccaatgaaatatgatggttaaatataatatttgtactcccttgttggtgttgcttaatgcatttcttaatcctccaatttatcgtgtcacacagcactaagctcaacaatttattcataaagtggctgcaaatataatttggaacaaacttttttttgttcaatataatttatttatttattgcttgtataatcacacaaaagtgtgagttccatgaggacagagacagttgtctcttctgtttactacaaacgtcttccgggccagtaataaccagaagttgttacctgttaaataaactgaaagtcaaatgtagggtgatttctacgcatgaggagttctagagctcattgatgtcatccaaggtttaaattcttagtgtaatgtattctaggctcatccatgttgtagcaaatggcaagatttcattctttttttaaggactgaataatattcaattgcatatatgccataatgtctttaatcatttatccatggatacttaaacgttgtttccatatcttggctactgtgaacaatgcttcaatgagcatagaagcccggatatctttacaaggttgtgttattttttcctttgtgtatatgcccagaaggagggattcttgggtcatatggtggttttgaattccttgcctcacaaaaccttgctttgtctttgcttgctgtttttttttttttggagacagattattgctctgttgcccaggttagagttcattgacccaatttcagctcactgcacccctgcctcccaggttcaacgattctacttcctcagcctcccaagtagatgggactacaggcacccaccaccacgcctggctaatttttgttattttagtagagacagggtttcaccatgttggccatgctggtctcgaactcctgaccattcccatcaatgatagactggataaagaaaatgtggcacatatacatggaatactatgcgaccataaaatagaatgagttcttgtcctttgcagggacatggatggagctggaaaccatcattctaagcaaactaacccaggaacagaaaaccaaataccgcatgttctcactcataagtgggagttgaacaatgagaacacatggacacagggaggggaacatcacacaccatcgcctgtctgggagtggagggcaagggtagggagagcattaggataaatacctaatgcatgcagggcttaaaacctggatgacgggttgatgggtgcagcaaaccactatagcacatgtatatttatgtaacaaacctgcacgttctgcacatgtatcccagaacttgaagtataataataaaaaaagacacctaggaatcattctcaacaactgtactgtccttgtcatatttatagtgcccacgtccaatacactctaagatcatatatgtcagaagtctgtcatctccccctctttccctacttctgttttgttgaagtcctcagtatatatctcatcaattcattttttcaacagttcttgagttcttatggcagcagtcaggttctgactattacatactgtcattcactggatatctaactggtcttgctgccctcatcttccatagatcattctccacactgcatccagaatgatctttcataaatataaatgtagtaccaatgttcatggtttgactgtcaattcccccaaaagattaccgggaaaacacgttgatgaaacaacgctgagtgtattagacatggcgccataagggaagacactaacttgacaaggtcttagtagtgtgtaaaaattcctacttctcagttcatatttcgcttcccttttcaatgcttccatttcttcttggacgtgttcttatgagagcacatatattttttgcttacttgtaggtttcctccactggactatgatttccttgagggcagctcttttattctttatatccattgtgatctaagtgagtgattaatacatagttgatacatgaatccacaatatgtgctcattttagtattaattgaatacataagacattgcttcttaagtgtgccttaattggcacaataacaaaatttgttgaggatttactgaagaccaggttcttccatgctgtatgtatattattaacatgtttaacttagcttaccaacattaggagtttatattcttgttattcccattttcagacgagaacactaaggttcagtggtacagaaaagaatttgagtctagatattttgattccacagcccatattcttaattctcggtacactacacttctctagcatgtttgataatatattggtaacactcaattgccaaatgtattctgcatatatcacaaccagtatcctgatatatgttggttgggttatgaaatgacacataatttgttcaacaaacatttattaagtttttacagtatgctagccacaatgtgagattccttatatgtactacctaaattaagtaacttaagtaaatgtaggaggatttgagacatgcatttactttcccctctttgatttctaaggcaccacacattccaggttttcttcctgtttttctagcatctgctttgattttaatttgctggttcttccccatcaacacaaattcctgatatgacagtaaccaggggttggttcttagaccacattcattttctcgatgatcttatctagcctcctggcatcaaatactgtctgtaagttgatgcctcccaatgtttacccccagctcagagctttctgccaaactccaaacttagatacacaactttttatacattcctagtcaattcaaatttaccctatgtaaaactaaatttactaacacccacatctgcttcgtcaatagtttttcctgtgtcagtaaggtttcactatagccttccagttgccccaaatgaacatctttgagtcaaacttagtcttgttctttctcacacctgatgttgttgattagaaaactatgccaggtttggccggatgcggtggctcacgcctgtaatcccagcactttgagaggccgaggcgggcggatcacgaggtcaggagatcgagaccatcctggctaacacggtgaaaccccgtctctactaaaaatacaaaaaatttgccggccgtggtggcaggtgcctgtagtcccagctactcgggaggctgaggcaggagaatggcgtgaacccgggaggcggagcttgtagtgagcggatatcgcgctactgcactccagcctgggtgacagagcgagactccatctcaaaaaaaaaaaaaaaaaaaaacctatgccaggtccaccttaaccaggtatatatccagaatctgatcacttctgactacttacatggccaccaccatcacctctggtctaaattagtgaaatagccttttaaacaagcctgcctgctttggccttgccttacctgtaatccattttgtctgccagatggtcttgttaaaacgtaaggcaaatcacatcactcttctgctgaaaaccttcccatgccttgccagacattcagtaaaatgcagtcctgctgttttataagcccatgcacaatcacctcctcctttctctatgtttcttctctggcttccttttccaccgttgttaccgtctctcattccaccgcagtcatagatgcctctacctggaacacatttcctccacatactcacatgacttactctctcatatctttaaatctttttctcaatgatattttccctagtactttcaattccccttccttgcttccttttctccataacacttacatccttctattttacttatttctcttgattagcatgccttcagtgacatgattcactgaatgagaacttagatttctgtctgttttgtatatggctatatcatcattgcctaaaatagtgcctggtcctttgtagttgcttaataaatatttgttaaagcaacactatttgtactaagtgacagagccagaattccatatgattttcaagctcttctctataaaataaatgaagttatgatgtattgaatgtataaaggctcttttgttagttgctcttctacctggcaagtctgtaattaaaataattttgtaaaaaattatctatttgaagtttttttattatttgttcaattgccagtagataggctagacaaagataagtttaccaattgattatggatatcttacattcttattaaaaagcaaaataataatggatataacacattattattttcatgattaaggatatatcacctctaatgagtagatactaaaagagccttaattttctgattcccttatttctcctcaaggcaaggatagatatccctgtgctgatggcatcgaatgcattggcaagcctaaaatcaaacaagctttctagtagactccactcaagattatcatcaatcttcctttgcaaatttggttttcagtttttgtcttcacattgaaaaatagtcaatatattggcaacaaatgtaatgcattactcaatggcaggtgatatcgctaaagatggtcaattacatgctaaaaacaaaggactttgaggtctgttggatgccaaaacctacagtcaattcagtcaatatttttgacagtacagagggaaaaatcactcaaggaaaattgccacagtatacattaaatatctttgtttatcccattttagttattttgtgtgatatctctaaatgctgttctgtatatgctgctgacaaggagcaaatttatttgtttagaaattctgcagcctttccatcctttgccttaactttcttgttgaggtactaatgagctgtgaaaggccaaatgaaagagaaataacacctccagataatctgtactctgataaactactcccagaataattgggagtttatggttgttgtagggcagtggaagaaataagcaatgttggccaactatacggaacaacccgtgttaataaatttgtaaaagaagtttacaaggcaatcacaatcctttcaaacaaatgtcatgcatgtactttcaggcctaggcacaatgttattatctgaaaagcttgataggtaggattgtattttgtcccactatttctaaatcaggaaattctaagcatacttgtgacgatttctcttttaccttaaatggcttccctattccagatttacagtttctgcatgagttttctactcaatttgcataattttaatttacctttatgttaaggtttttgaagagctgccgtactttcatatttggagtttaacatattttaatttatggacgtggcaataatttgatgacctttttagtgtaatataaagcctatatataaaaacttccaaatagaatatgtactgagtttgtaggaaatttataagtattatgcaaatcaagaatatggtagctgattccactagaggctattttgaaaatataaagaaactttgtttttaaacatagtattgattatctcactatgtgacaaaaaggtatttctgtttattctgtttctttccatttctgctttccaaagtagaacaaataagttgaaatgtaccaatgggtgtgttttaagttttgacaggtttcgggtatgattatataccaacaaaatcccagtaatatttgctgcatatttcattgtatctatattttatgtactgatttaaaatttaaaatgtgagtaaattttaaggcattgtgctaatgaaacttatggtagttcattttttatttttatatagacaagctatctgtttagaatgcaaaaattatatgccatatacaatcatattataaacatataaaattggtcacagaaatttctaagggtgaaaaagactggatgaatcaaagaaatctatccacaattctgtgagtgtatgagagacttagaatgatcacattcacataaaatataacacattattatattttgatttttaaattaaattttataaatctagctatctctgggaaatgtttcttccccttgagttattacaaaaaagtctggcaacaagttaatattcaggatttcgtgagacagatactgaattcagttcccatctctgctttttattagctcttcgaccttgggcaagtttctaacctttatgaatcaggtctcctcatagtaaaatgtagacaataatcatcccttatgttgtgaggttaaattagatgatttagtggagtgcttacaccatccctcacaaatggtaaacacttaattcactatacttcagttctggtggtaaattctaaaagaatttagatgatgaagacagcattataatttaaagcacagtctacacagtggatagcacccacttaggagatacacacgatgaactggggttctagaaggacatattataatgtctcttcacaggcttatttaagaattaagaaagaaataaactttaccaatttttaatatacaggttttcagataatttgatgtaatatatggtacttgatatcttctgtggaaaatcagagatccttaataggatgcataatgtcaggcctctctcttatttattagcgtttttggtgctcttgatgtgctgctatgtctatgaacactaaagtgtgtttatagattatgttatcttaagtagtagaatacttaaaatctttgtcagcaaaatcagagtaacctaggaaatctattttactacacagaaatgttctggacatctcatggcaaagtagttgaaaagattgagttatgtactttatttttgaaaaggtcaagtgttacataaatgctgaacattttcaggttggcaagtggctgtgagtactatgttatttctcaaattatttccaaaagcagaaaaaaaccttcaatctttgaaggagaagcttctgtattaacaatattaagaaagagactagattttataagacattcatgctatggagagagcattttaaaaatggatatttggtggtagtcccattataaataggtcagttataaaatattctatacctacagaaaataaatggaaagaaatgtcaaatctgtttaaaaatattataagtgaaaactttcagtgaggttttgtctctgtttatgactttaggacgtttactttctatgttcacctcacttagggttctgtttcgcttttctgctcatgcttccatttcctcagttggtaatatacacatatctgtacatatcctttaatcctcttctagtatcttcaccaaatcagaagtgattgctcttatcacttagcccaccctgattttgagttttttttttacttgaaaatatgagaagtaatgttagtataacaagagatggaaacttatcaaaaggtttcatacttttatttttctgaaatgcaaaagacttactgcgttcttctcagttctatgaaccctaagatcaaaagctttagttgtctatgggacacagagatacagaccctgaagcatgattactcctattaggagccaatgataaaattgaagaactttccactgctttcagccaacaggatagaggacttttattactttccttgaggcagagggtggaatttgcaggtgttaatgaaatctaccagagtcttcccaagaattaataccattctttgaaatggcaggctctgaagacctttccttgaataggaaaggaataggaagagattccaagaatctctttccttgaatagggaagccaacactgcattgaagaaggcagtaagtgaaataaacaagtggagtttgtgtcatttcttgtccctgctctgtcatggaaagatgccttggtctaattctcttaggaaaaaaaatgtcctcatatcagtataaggtaaaatggaatattgttacatgtcatatgctaagagacacattattgtattcaacaaacatatagtatgttatactgtatgtcaggtgctgaacaaaataaactgtctactgtcgtgaggcttccgagatgctacatcacctctcataaaagaacttccccatttccacaatcacacccttataattgtcttcctaattagctcactagttatttatattatttccctaattttaataatgaaactatcccacagaagcactatagatgcccaagaagtagagacaggaagctacccattagttcccccatagggatttctctcccttatgaaggatataccacatctttgtttaaggaataaggaaaagagacaaaggtatgtaacataaataaagagaaagcacacagaatttagtgatatatgtgaaaggtaacgggataaaccaagcaactggtgtatgttaaggaggtgaatatagctaatgtccttggagaaaatttacctagttagaaaagatgtgtcaatttagtagaatatttttacaacctaaaatctaattgaaccaaactcctctttattgttgttagttctctattctgggttgcactaaataaaaacaatgaggcagtgaaagtgattttataaaagttgaatggcaaagggtgatgctgaatgtcaatacaatcgctgtatgttgtctgtgagccttacaattaccctctaaattagtatcatatctattttcaggtgtgtaccaagagtgtgaaattaaaaaactttgccaagttcaagtacacactacctataaattccagaacctgaatttgacctcatgtttattttactccaaagtgaggccgacttaaagtttcccgaatgcggccactggttttatgcagcatgatttctttgagacattgttatatacagcaatggaggtagggcagggggagggcagtgagatttcagagatggctagcttggacatgcaatagagtgggaaagtgacccaatgagaatcaattggagggggagagattggagagaggaaagataatcaacagtgagaagttcagagaaattagtttaaatgtgggaagcaatttcatcatcaggagatagcaatctatggcctgagggtgaaaatagacttgctacctgatttttgtaaataaagttttattggaacacatccatgtttattcacttaatgtattgtctccagatgctttggggctacaatttgcagtgacagagctgagttgggggcatctggtctttagtggtctgcaaaattgaagatacctattatctagccctttacagaaaaaagcttaaggttaaggagtcttggatcaaataacaggaagaataagattttcactgaaattagtgtaagtgtagataagtttctatattttggggacatctcttgtgctaacttctaatttctttacatatagacttgtggaataaatgagtacatagctaagaatattataaatgatgagaaaaaaagcaaaattccaaaacgggctacatgggaatatttatgtttaggttctcctcatagctcacaattaatttgtatatgcaattacaaactctatggactacggtcattctagaggaatattatttaagtgcagtatatgtcaatttgaaataataagttttcacgagatatgtgtattttgttttgatttttttggtatgtaaaaaccacttgtctaaagcagtttacttctgaattattttgcattttaaaagtatccagtgaatcatttttttcctatttataaatgactgattaaaataaataagacttggtgtttttccatgagacgtatttgaaaattaataaaattgttaaacttaggattaaggaaaataacattaagaatttatttggtcttctgagacattttgtaactatcctattttaaattaaatttagtacttttacaaaatctcgtttcaattaccaactcatatgaattccaaccaaatactgacttttaaaattattgaaacatccaccaaacagtacagagttattatgttcatccttcttctctggacttcatgaatctctgtcagccaaggaatgtcggtttgtttactgggtatcccatttttcctcccacacctcataggtgtgacttggatttcctcatcctcatcttggaaataggtccccccttttagggtgtttgtaagaattatatgaaacagtaagaacaaagaaatcactaggctagacgtctttcatgtgccatctaataaatttctgagaaagtttttttattgatgcttatgaaaattttattataaacttgcttttaaaaagaaatcttttatattgggttattaaattgttctaggtacatttctctaaatcttctattattttctctctgaccttccattgatttaggagaatttgccataacagtgcttatttctttttcttccttcttgattttatgagaaaggttctattgtgtggattataatagccaagacagaaagtctcaggtgaagtacaggaaaaaataaaggaataaaatataaaataagttagaaagtaaatgtatacccaaagatataaatggtagaattagagaaattagaggaagaaaacacacacacacacacacacacacacacatataagttggtatactatatatgtatgtgaatatgtatatatgtataaacacatatgaaatatgaataggaatattgggaagacatatatttgaaactatgaatattttatgccatattactccattttcaaggtattgattggttaaaacatattttatataaaacctgaaattggaagcacaaatgaccttaaataagaaattaaaattaccccaaacaatttagtaaatatttattatctgtgtactgtgctgttaggcacggggtcagtgtccccgccttcctacaatgcaagggttagtgtaatatctaaaggtatgtgacttgaaaaacgatgaagcaaaatgactggaaccttcattgagagtatgttttagagagacagagtagagttttagagagacatctgattttatagtagaaagtttattttaaactcacatataagcttttacagatacatttttatagtaaaatctcagctgctagaaaattagagtatatcagtatatgagattgctgtaggtttcgtggcactaacaaaaacacaaggatggatgaactaaaaaatgagtttgtttctctttcagacttacttctcttaaatgttgtgtagatgggagtgatggaggccttgtaggaagtctctgctcattcagggatccatagtcctgttgcccagtttttcgatcatcccctgggacgctgtcttcgtagtcacggttgaggatagctcaccagcttcatgtgtgtatcacgaccttcaggagggaggacgaagaagagagcatatctatgcccatttacgtcttaatgacgaagttggatgcgttatatccaactggccaatacttggttacatgccacatctaactgcaagggaaagtgggaactgtagtgacatttctagatagccaaattgtcccctaaactttctaatactacataaagggtgaagaaagatacatattggaggatgagcaatctttgccagagccatttttttaatgtaggaattaagattaatgtttttcaaaaaaaggcaggggttgcaatcctagtgtctgataaaacagactttagaccaacaaagatcaaaagagacaaagaaggccattacataatggtaaagggatcaattcaacaagaagagctaactatcctaaatatatatgcacccaattcaggagcacccagattcataaagcaagtccttatagacctacaaagagacttagactcccacacgttaataatgggagactttaacaccccactgacaacattagacagatcagtgagacagaatgtcaacaaggatatccaagaattgaactcagctctgcaacaagcggacctcatagacatctacagaactctccacccctaatcaacagattatacattcttctcagcaccacatcacacttattccaaaattgaccacatagttggaagttaaagcacccctcagcaaatgtaaaagaacagaaattataacaaagtgtctctcagaccacagttcaatcaaactagaactctggattaagaaactcactcaaaaccactcaactacatggaaactgaacaacctgctgctgaatgactactgggtacataacgaaatgaaggcagaaataaagatgttctttgaaaccaatgagaacaaagacacaacataccagaatctgtgggacacatttaaagcagtgtgtagagggaaatttatagcactgaatgcccacaagagaaagcaggaaagatctaaaattgacaccctaacataacaattaaaagaactagagaagcaagagcaaacacattcaaaagctagcagaaggcaagaaataactaagatcagagcccaactgaaggaaatagagacacaaaaagccctttaaaaaatcaatgaatctaggagctggttatgatcaacaaaattgatagatcgctagcaagactaataagaaaagagagaagaatcaaatagatgcaataaaaaataataaaggggatatcaccaccgatcccacagaaattcaaactaccatcagagaaaactgtaaacacctctacgcaaataaactagaaaatctagaaggaatggataaattcgtggacacatacaccctcccaagactaaaccaggaagttgaatccctgaatagaccaataacaggctctgaaattgaggcaataattaatagcctaccaaccaaaaaaagtccaggaccagatggattcacagccgaattctaccagaggtacaaggaagagctggtaccattccttctgaaactattccaatgaatagaaaaagagggaatcctccctaactcattttatgaggcaagcatcatcctgataccaaagcctggcagagacaaaacaaaaaaaagagaattttagaccaatatccttgatgaacattgatgcaaaaatcctcaataaaatactggcaatccgaatccagcagcacatcaaaaagcttatccaccattatcaagtgggcttcatccctgggatgcagggctggttcaacacacacaaatcaataaatataatgcagcatataaacagaaccaaagatagaaaccacatgattatctccatagatgcagaaaaggcctttgacaaaattcaacaaccttcatgctaaaaactctcaataaattaggtattgatgggacgtatcttaaaataataagagctatgtatgacaaacccacagccactatcatattgaatgggcaaaaactggaagcattccctttgaaaactggcacaagacagggatgccctctctcaccactcctattcaacatagtgttggaagttccggccagggcaatcaggcagaagaaggaaataaagggtattcaattaggaaaagaggaagtcaaattgtccctgtttgcagatgacatgattgtatatctagaaaaccccattgtctcagcccaaaatctacttaagctgataagcaacttcagcaaagtctcaggatacaaatcaatgtgcaaaaatcacaagcattcttatacaccaataacagacagaggcaaatcatgagtgaactccattcacaattgcttcaaagagaataaaatacctaggaatccaacttgcaagggatgtgaaggacctcttcaaggagaactacaaaccactgctcaccaaaatacaagaggacacaaacaaatggaagaacattctatgctcatggataggaagaatcaatattgtgaaaatggccatactgcccaaggtaatttatagattcaatgccatccccatcaagctaccaatgactttctacacggaattggaaaaaactactttaaagttcatatggaaccaaaaaagagcccacattgccaggtcaatcctaagccaaaagaacaaagctggaggtatcacactacctgattttaaactatactacaaggctacagtaaccaaaacagcatggtactggtatcagaatagagatatagaccaatggaacagaacaaagccctcagaaataatgccacatatctactactatctgatctttgacaaacctgagaaaaacaagcaatggggaaaggattccctatttaataaatggtgctgggaaaactggctagccatatgtagaaagctgaaactggatcccttccttacacattatacaaaaatgaattcaagatggatcaaagacttaaatgttagacctaaaaccataaaaacctagaagaaaacctaggcaatacctttcaggacataggcatgggtaaggacttcatgtccaaaacaccaaaagcaatggcaacaagagtcaaaattgacaaatgggatctaattaaaccaaggagcttctgcaaagcaaaagaaactaccatcatagtgaacaggcaacctacagaatgggagaaaatttttacaatctaatcatctggcaaagggctaatatccagaatctacaaagaagtcaaacaaatttacaagaaaaaaacaaccctatcaaaaagtgggcaaaggatatgaacagacacttctcaaaaaaggcattgatgcagccaacagacacatgaaaaaaatgctcatcatcactggccatcagagaaatgcaaatcaaaaccacaatgagataccattgcacatagttagaatggtgaacaataaaaagtcaggaaacaacaggtgctggagaggatgtggagaaataagagcacttttacactgttgatgggattgtaaactagttcaaccattgtggaagagagtgtgcaattcctcaaggatctagaactagaaataccatttgacccagccatcccattttatcccattacagtaatatacccattactgggtatattcccaaaggattaaaaatcatgctgctataaagacagatgcacacgtatgtttattgcggcactattcacaatagcaaagacttggaaccaacccaaatgtccatcgatgatagactggattaagaaaatgtggcacatatacaccatgaaatactatgcagccataaaacaggatgagttcatgtcctttgtagggacatggatgaagctggagaccatcattctcagcaagctaacgcaaggacaaaaaaccaaataccacatgttctcactcatgggtgggaattgaacaatgagaacccttggacacaggaaggggaacatcacacactgggtcccgtagtggggtggggggaggggggagggatagtattaggagatatacctgatgttaaatgacgagttaatgggtgtagcacaccatcatggcacatgtatacatatgtaacaaacctgaacgttgtgcacatgtaccctagtatttaaagtataaaaaaaaagattaatgtttttggctctagaaccttttgtttaataggctatagaatgagatttttaaaaactaaaataccccatatgtgtacgtatgatacccatttttgtcttcttaactggagcatcggaggcacaatgtagcatttctgtgagtggttctgcaatagtgaagaatgttaaatttgctgacatttaacatcaaaggcaaatcatagggattaacagaaggcgcagagttcgaatggtggacttgacacatgccttcttttagaaagaatttgttagctttattttttgctcagcttcttctgacttctttttctgtttatgtttttaaaaaactgttaaaattatgttttaaatttttgtggctacgtagtaggtgtatgtatttatggggtacatgagatgttttgatacagacatgcagtgtgaaataaggacatcatggataatggaggatttaccgggtctgtactaccatctgggctgtgtcccattgctgtctttctggtattctggtatcttcctcagtgtgatatcagtgtctgtgacttgcgtgcattatttagacttgacatttgatttcctactcagcaacgtaatgaagacgaggtattttcctagtagcttccaaaccattgattgaatttgtggaaattaagaaaaaatacactttgacttatttttaagaagttacgtgagggccggacaccgtggctcacacctgtaatcccagcactttgggaggctgaggtgggcggatgacctgaggtcaggagtttgagaccagcctggccaacgtgttgaaaccctgtctctattaaaaatataaaaattagcccggtgtggtggcttgtgcctgtaatcccagctactcgggaggctgaggcaggagaatggcttgaacccagaagggagaggctgcagtgagccgagatcccaccattgcactccagcctgggcaggaagagcaatactcaatctcaaaaaaacagaaaaaaaaaaagttatattatatttttttaaaagtgctgttgcttagactcttaattcattttcttcatttaaagagattgatcatattgggataaagacgtgttttggaatccaaacaacctggttttaagtcccagaaccaccagttacctttgtgacctttggcaagtcatctaatttttctatttccatttcctcatcctactaatttctatcaccctgatctgttgtagtgaaaaatgatataatgcgtgttaagtgattagcaaattgactgacactaagtactcaataaataatggcagctgttgttattgctgttgtatatgcggtagtagttgtatttgttgttgattgttgccctaacagcaggccatgatttttcctaaatcctcattagggcttaactttgaactcaatttcaggccctatctatattaaaaattacctatttaatagtgtcattaggttgaatgtcatgtacagtgttgcatgatggattaatttctcataaatcacttcagtaatcatttttatgctttgaatagtaccttggtttacgtgttatatctgtgagaaaacacagcggaaatgtgtcaagaatatttccaggtactaatcctggttgttcagaaatgctcttctgttatttagtgaaagaaccgcttggttatccctctgtaatcctttatcttggaaataatcttttactgaggggtaaaaagattatagaatacaccaaaaaattcaccatccatgcattgacttagactccatgaaaaagaagtatgatacatttaaatgaactgagaatgataaaatttgcaaatgttcttgaagcatttatgcattcaagaccaataaaactgtttttgatccaggttaacagtcgtatcatactttaaggctgaatttagataaattgccaaaatccattttatcagtgatataaaactgctcagtgatagactgtgccctctcatagtgtcccagctattttttctaagagctttgtggtttgctgggctgctggtttcactacctacatgtagccacttgattacttatctcagtttgaattgcccaaatcatgcttccagaaacacacagagctcattcacctgtttccccataaaaatcatttatcatttcaatgaactttggcccccaaacacaggcattgcagagcatttcttgggatctagaatgtgcttagcattttatatgcactatctcatctaatctttccagcagccttacgtacgtatatttttatttttcttgttttatagatggggtaactgagatgcagagaggttaaatacccaagatcagacagatagtaaactggattttaaaatatatttatatattcagaagtatcaaggctattgctgtatacttcattagaaccatttctagtcagagaaattctacgagtagaaattatgactagaaattgtctccagaaatgagtgtctagagatttttctagacattgctggactaaaacagtcatttatcatccctgatttttttacctttctcctttctgctctttcaccttttttttttttttttttttttttaaaagagacggagtcttgctgttttgcccaggccggagtgcagtggcgctttctcggctcactgcaagctccgcctcccgggttcacgcctttctcctcctacctcagcctcccgagtaactgggactacaggcgccgccaccgcgcccggctaattttttgtatttttagtagagacggggtttaaccatgttagcgaagatggtctcgatctcctgacctcgtgatccgcctgcctcagcctcccaaagtgctgggattacaggtctgagccaccgcacccggcctcttccaccttttttaatgagcgatgtcttcaaggaacataggtgacaatatctaatacttcctaaatctaacaggcagtaattaagcctctgaagtctgtggataacgttgaataaatttgagtgtactcaattttgggggaaaaaaaaaaaacaaaaacagaatcgtttcatccattcactgtcatgcctctcatcgtaatcattatttgcccaatgtactgaagagaaacataaactactgtgataaagacaaaataggattgaagcataggaaaaataattagttccagttgatgatactggcatcttcattcatgaaacgattggggtctatctttcttataaatagatctataaagaacaaaaaccaactttcctagaaaatctcttcatttgatgccatgacatgtatgaagtgatctccaatcttaggtacaatgtaaaattctgtgatgataaaaacatattttggggtgctgaaacaaagcataagccactttttatatctttatttccaaattctcagattaaacatcgttttattttaaaatgtcttttattccaaggtctctatggaaaatatacaaatgtagaattcaggcaaatttcttttttcgtcggtttgcttagtctgaaattctagagccatttccaattttgttttacaaactgcagaaaaaagtttaatctcaccttagaacatatatacatatacatatcaaaataaacccatatgcacatctgaaacaaaaattgagacaataattgttagtattatataagtgacacagactactatttttctgtttaattttaaaatattcctagtcataacctactaacatgattttatgaaccatgaatggattctgacttacaatttgaaaaacaatagtctatctagacaaataattactcagatcttaaattcaaattttgattataattctgtatatatatagttgaattgatggatataaatataaaattttgcatagcttattcagatttgaatttatctttaagaaggctgtctttgaaatgtttttgttttatgcacatcctcagacaaaatatttaggttcagaatttgagtactagatgtcatgtccttgagtataagtatacaccttttaatattttcttccaaaattcaatcctgtgtaaatatcaataaatcataaagtgtttaatattttgattcaaattgcacagtgtaaagtattgtgttacttgagtattagtgctgtttacaatgcttcgtttggagaagattatttgaactcaagatagttaatgatttttaagaactcttaaatacgagctaggttaaggttcagatttcaaaaagagttaaataatgtttgctcttacacatttttgggggcgtattttcgacaataattttccatctcctgaaacctgaacagtgacttaagaaggtaatcttggggcaatttatgcttcaaaacacttcttatatatgcagaggaatttgataataattacagccgtaacatactttatttagttgttatacaaggtcactctgtgaagtgcattatgcactctttaattcttaccacaatcttattatggaagtattattgttcccattttacagaagcagaaactaaggcttatgcagggctaggtaactcccaaagtcacaagattccctttctttctatatcatcaatttcagcataagtggttggttcatataggaacataacaggagtaggaaaggatatgatagggtttcttggtcgtttgtattttcttgaaaaaattgccttcttgctgcatttgaagcagggtctggttcagataggaagcattatctcccagggctgccagcaaccttgtttactcagttatagacataacacacttacgccatattctttgaatcttactaaacttactgtgagctcaccagacttctgtgcttctagggcattgaaaatgctatatgcaaataggacagatacacatattataccacctgtctcctctgcgcatgtgcatccttcattgcacataggacttcacttctaaaacacaaattcaaaaataaaattatttacaatttcaggatagtatcagcagataatagaggcatgtgtttcttctgcgctcagggccctgtgcaactgctcaggttgcacaaacgtgaagctggttccacctgcgcacatctctcaggctgcctttatatcattttcccccttaatgctgactttgatagttattattaatagtatttagagacggaagagatacaccatggaagttgttctaacccctaagaccttcagaaattgccttactgttagacaagggttccatgcaaatagccctttcagtgcacttaccctctttgatatgatgaagttcggtgattttgacttaccaggatgacctttctctgccacttttatagaaactggaaaaagagtgcatcatttgatgaaaatgtcattgcaataactgccactatgccttgtcatctcgaaggacttaacagttggggaaatttaaaatattgaattttcaaaatttgagcatttatcagaagagcacaagtaagttggtgctggcagcttagtgggttaattcccagaactgagaaggacaggaaatgtagcacatacacaccaggggaaagccaccaaaggttgaattttctctgggtgagattatgaaatcccccaaacagcttctgttgttctacactgctttttgattcctttacaaaaccctgtttgttagggggccccgtgcttgcttgcaatatttgtggaatgcagaagattcttctacaaatatttctccaatatttgtttgttctgctcacctccgtaaatagtatgcctatgtccttgacctcagcaaagtccctcttgagcatgttctcaggatttttgaagcccggcgacctgcaaggagtacactcctcccaaagcaaaacctcctgcaaacttagtagtttactcaaatttttgcccttgataaatgcctttaggttaaagcagcagacatgtagtttatcccaagaagcctctcctgtcacttgagtgtatggttcctatagcatgcaaatctctgcaaacatatggccaggtttacagctcatgtaaactaccccgtctctattacttggcttcagatggggagaagttagagccacgcagagcgctccagcctctccagaggaagcctttctcaccagatttttctaatcgacctccttgcttgctcttacacacctttaagctagatattggattaagggttgtgagaccaattttgtgatcacttcttagcaattttttaacaggtaccctggatcttctctttagaattatggatgcttcgtacactttgctcttggctttagggtccagacggaaattccaagacaaccatttgcattctcacttaatatcctgctaattaaattgggtaaagcatacttcatattttagttcttctaagataatgtcttactatttaaatcgtggccttctggaaataaaggctaaatcacagaagtcattatgctgttagaaattttagatgggtgggtgaggtattttttttctttctaaattttgccttcctttcccctacctccttgttttcttactgatgcctttactggtctgtaaatatttggaaatatttcattacctagggcctctcaggaagagatatttcctttaatgccattgcagaggtatgtaaatataattctgataatgtatatgtaagttattataaataagaaatgaggaaagttcctacagatcaatatttatagcatttaaaaagcaacatgaggtgatatactaatttactccttccagtaatctagaagagctttaatacaatattaatttggtgtggattttgaccgctatttgaaaattgatgtatgcatgaggaagttaaaatgaaaactccctattgtctgtatctgctgttcctgtgtttgataatgccagtggacagtcctagcattttaaatatttcattcgattcatcatttaatgtactggaacaatctgcaaagacattaattgtgtaacacccaatttattttattgtgcagcatttggaagctcctgaagacaagtcatttggcagttcattgatggagagtgaagtaaacctggaccgttatcaaacagctttagaagaagtattatcgtggcttctttctgctgaggacacattgcaagcacaaggagagatttctaatgatgtggaagtggtgaaagaccagtttcatactcatgaggtaaactaaaacgttaatttacaaaacaaaacatatgacttgttataatggcaagtcatcctttttcctcaattactctcttacatccttgtattttggaaatttagttactatgatgtgcttgggattccaacagtcagattttgaagttttcttttggagagcaaccattgaaggcatttctacctgatcggccaacaggaatacgaaagcccaacttctttctcttgtgtcaaggcagtgctgaggcattacttacattcctgagttgatgtatggtattgggcttaacttctctcagtgggagacttttcctgagatgatacactcgtttggcttctttcccttccctgtcctttttcctccatcttcaactcccttgcggaacttcctgggagctcttccttaataaatcacttgcactgaagtccttatctcggggcctgcttctgaagaacttgacttaagataattttccttaattcatattaaaagtggttttgggattctgcaaatacaaattaaattccttttactgggaatataaatctaaatgggccacaagtttaaaactgcaaacaaataaaactcaaaaccacaccgatttacctagagttctaattacaattgttaacttccttctttgtcaggggtacatgatggatttgacagcccatcagggccgggttggtaatattctacaattgggaagtaagctgattggaacaggaaaattatcagaagatgaagaaactgaagtacaagagcagatgaatctcctaaattcaagatgggaatgcctcagggtagctagcatggaaaaacaaagcaagtaagtccttatttgtttttaattaagaagactaacaagttttggaagcttgtgattattttgatgtggtttgatggttaagttacgattctcagtttgttcccaaggcacacagctttctttcaagggagactggttggattttcatagaaataacattttggttttcacttttgtaactaaaagagcagatgttagatagatgcactgttatctacagaactatgttttaagatttgccaaaattctgtcatagttattattttctaggttttcctccaaacattaaaatgtcactataaaaggcacagaagcatgcacaggagattgtgtacataaaatcacctattagctatagttgacacgaaacttctcttctgaagaaaaagcccttgaaaatattaaagagttactcatctatatatggaaatcctcttgaaaaacattattcaaacgttttgggaaattcttattaaaatacagtatggctatgaattatcttaagaatatatattgacttaataaaaaagaggatttgagacatttctgaaaaatgacatatttcttataaaggtaacaagcagatctcatcattctggatatgtgttttgatttatattgttaggtgtgtatattcatgtaaagcctatcaagacaagatagatttatttttaaatgaaaagaaatgaagtgccaactgtggatttgaatacattaagtgaaaaaaattgtccaaatgccttaagtttatttaactattatttatgaagttcaaaagcgttaaaaaaaaaaaaggaccaaggaaactcattagatatgctagaaggattggtattccagtactaaattatagtgtgaaattatggaggggaaaaacacatttttaagctcaggccttttgaaagaataaataaggtacatgtaagatagaggtttcataactatatatgtattccaagccaggagatactaatctatgcatattgatattattcgcctgctgtgatcgtggtgatgattgtcactacccctagatgtgagaggtacaataatcatattataactgttgagtctgcccactccccagtgtttaccaggtccactaatttactccatctattatcgatattaagatataagctgccttctgtggtcatatgccaacattcttcaggttagaacttctatttgcagtgatctgtggaacttaaagcaacctcaaacaaaattagaaagttttgaaaatccaaccacctctttactgtccttgccataatagccaccagtgtcttctcctttgtgcactctaggtttccatcctctcctggaggctaaatgctctcatttttcttacactccccattttcaataaaactaacaatatggcattaattattcatactaatcagttaattaattgctgtgtgaaattgagttgcaagaaaatatgaattcctcctggaattaaaattgcaactttttctttgcttatctgaaacataaaaaaagtcttttatctgtgattctaacatttaaaaagatgttcattcaaaaattccccccttcaagggatgtctgccattaagtgaaggatgacagacacctagacttctgtgcgtgtaatttcctcatccccatcccactagagaatggaaatgctaaaatggcagtattaccacctagctgagattgacataaaaaattagtttgtccttagggaagattcaagagcttttgtacgtgttacagcttttagaataattattaagaaggcaaggagagccttctagctggtatagcttttgctaaaacatctcacagagtttttaaaatgagacacgtacatgtaaccacttctatcacatagacttttctggaaaattccttaaaaatgaatatacaaagcattatttgagcaacacaaattcagaaataatatgagagtttataaataacagtcttccttgccactttgactatgtatgtgttcgtgcataaaacctattaaattctaatgtgataagccattatgtaagctttgctgaacctgatttttgaaagattttgtgagaggaaacaaaaaacgtgattatgaaaagagggtattgtcattatttttaaaaaactaatctaggttttacttaatgcttcaaataaattataacctgttcagtttccattatcatggtcatgagaatggattatctccaatgattagcttcaacttggagcattacctattttttttctaaatatatgattacttcagagtagaagattactagtaaacaaaaatggattcatcgatacttcttttctctctctacctaagacagggtttggatagatccagtcggaagccattatttcctgcctaagccttggtttagcgattagagaaatgataattaacatttgtctagtcatattaagtatatccaaagctatgctataatttctaagttgatataacaaaagttaaaaacttcttgtaaatacagataagcttatcactaaaatctatgaacatttacacttagcaattattaatcctatctaccaacatacttactattaggttgctgcaaaagtaatcatgtttttttccattgtaagtaatgggaaaaactgtaattacttttgtaccaacctaatagcaacatcaaattatatttgatatatagtcattgtgagatatatatatatatatatatatatatatacgtataaaatacacatatatctctctatatgaacaaatattaatggaatacattatcaaaaacaattaatggcactggagactcaataatgatcatacaaggtctggccccagatctcatgaaacatattctgtagaggctggcagccaagaaaaaaaagaacacaagaaaaataccggataggaatatagtttttgaagagattaaaatgtaatgtgatagagaatggttgaggggaggctactttagactttgtgatccaggtaagactttgaaggttggtaccatttagtttgagatttgaatgacaagaaggtaccactatttgcagatcacaaggaagtgtggttcacggattaggaacagctaatgcaaaggcccaaaaatagggacagtttggcttgctggaggaaccaaaaggccagggggactgtagagttgcagggtggtaagttagatggctgaggtctgagatggggttgaaatataggtaggagactgattacatattgtagtgtcagtcagggctttgaataagggctttgaattctagactaagtgcaagacaaagccatcagattttatgtaggtgagagataggtcaagaaaacctatcaggaaggccactggaggaagagaggacagttattaggccagtgaagttggccagttaagacacagtagtgtcttagaccagctggtagttgtgataaaagtatactttactatcttagccatttagttattttaaaaaccacttctctgtttagttttagttcctatttttttttccttttgacagtaaaagtgctttttcctttggaaatagactgcttcaatttgtgcccacagttactattattcaagttgcatctaggaaataatatttatcccataaaccatcaacaattatgcaaaacaagaaatattaaaaatacaaagataatagcgtgccctgatttctgccttacataaaatcctctccagtttgcctaaggaataagggcttgctttctcaaacacttatttatgtgaactggggcaatatacttttcttttctgttctctactttatagttttgtaaaacagcaatagtgtcatgaggctgacatacctctgaaagatactagatgagatagggtataaaaagttagtttgtgaatgcaaaattattataaaatgtgaagaaagataactgtgataaataagatgatgagctgtcagttaactattttaccataccatgtcactttttatatgtaatttgatattttctatatgaagtattatataattttatatataattatatttcatatattttgtataataacttatatataattttttaacttttaaaaaaattttgcagggaatgaggtcttgttatgtttcccaggctagtctcaagctcctggcctcaagtgatcctctcccaccttggcctcccaaagtactagtattacagacctgagctaccaaacctgaccctcatagatgttttttactttttttctccagccttttctaattgcctcagtcatttttttttcccaaagagtatagctgtggttattttgtatggggataagggagcatgagcaggatgattagaaatacatttgcagttattttttcacaatggcaacatttaaaaatatgcttacaaaggaatgtcaggaaagataaccatacagatacttcctcctttctttctccttcataaccacactctcatttgattctttccttgctattgtattttccctccaattctgttgcttttatggacataaatttctgatgaggtaaaagctaatacaataaagaagtttattaacacatctccagtcacaaatgagtttggcacgtgccgatactggtcaattacaaaactttaccaatgtttatatgatttaaatgagaaaactaagtgccattcctttcataatgtagtgtttaaaacaagagaatattgatgtggttttgttagaaccccttaagaggagtaagccaatgattttttttttaatgctgtggaatacacttgggatggtaggaggtaaggaattcggaagaaaaacacacaacttccaactgtggaagtgcaagaagacaactggcacagggaaaacagaagattttcttctctatgaataaactaattaatttgattgaaaaatgcaacctgcagagagcaaaaaagatttactgacatttttataaggactcaaagttaagcacagcaagttccatcaacttttctgataattgtagttaggacatgcaggcagaaactaaaacttctgtgacggtaagggaaaaaaatgaaagcaagtcaggaggccaagtgaagttgtgttttttggtttatatcagcaggaggagagatatgaatagtatctgggtagatacacaagccataatatggaaaataattgtgaatcaccatcaatgctttgactggacagaaaaatacatctaacaaatatggctcatctctttttttttcccccaagtgtctatttgactctggaaataagatggcatatgtgagagtggatagagaaaaggaggtgctgaacaaatgagtgggttattttctcccaagtgcagtgaagtttgcgtatgtgaatatatgaatgaatagatgaacaactaaattaagttattcaggtaattccaatcttggaattgaattcgttgcagtaaatactttggaggtgcacaatctcaaactcctaattgtgattttatttcacaatttggtaagttcattgatttttctgttttacttcttccagtaatgttaagcaatagtaacttgcagatcaaggtggtgtaggaccagtagcatcagcgtcacctgagaacttgttaaaaatgcagactctcagctctcattctgatatatacagaatcagaattgtgcagtttagcaatatcccaggtgatccctgatcagtttaagtttgagaagcactgatctaactgaaattaagacagagtagaaatctcaacttctttgtaaacctctacttagatatcttctgttcctatttttctatcaagtgacgtgggccaaatattttaattactttctcaggagctctaaaaatggtgctgatatttcattcagtcctcatatgttgatatcataccccatgggtgattaagcagtagcaagattctggtgcaataatatataacagacaatatatgagtgttgatgagtattgataattaagctattggactaataagaagtaggaattatttatagatgataacgtgacattcggttaggttgcacatggattatggtcataataatttttctgtcaataattaaaaatgtgataatgcagctaaatgtggacatctcttgtactaataatacaatgcatgtgactcatagtttaaattacaggaaagctaaatttctggaattcacagaaatgagagagccgtatcttcaaaaacaatgctttctcacaaagataaataatgctgatatggtttggctcatcttgaattgtagttctcataatccccatgtgttgtgggagggacctggtggaaggtaattgaatcatgggagtgtaaccctcatgctgttctcatgatagtgagtgagttctcacaagatctgatggttttataaggggcctttccccttttgcttggcccttcttcctgctgccatgtgaagaaggacatgtttgcttccccttccatcatgattttttctgaggcctccccagccatgccgaactgtgagtcaattaaacttgttttctttataaattatccagtctctattatgtctttaattagcagcgtgagaacagactagtacagtacattggtaccgcagagagtggggtgctgctataaagatacccgaacacgtggaagtgactttggaactgggtaacagccaggggttggaacaattcaaattaaactaatagactatctcagagagcagatttaatagaagttgacattttaatcttagtacaaaaattcccaatcagaaatatcaaaactatgtcttgttcataattaagttatactacttatacattgaagaaatatttattgagtgtgtagtatgtgccaggcactgtgccagatgctatgtagtggcaaaatttttgaagttgagagtgagcttctatttccacataaatgaatagaatttcagagtgtcaacattacctattcttactagagataatttaaacagtcttccaaacgtgatatattcatatttgtccttggctcctgatgacatctgccaatttctttattttctttaaaagcatttaatcaggaagattgatttgagggttgccataatgtatttgccacaagaatctttttctttttctttttcttttttttttgagacagagtctccctgtctcccaggctggagtgcagtggcgctatctcggctcactgcaagctccgccccccgggttcacgccattctcctggttcagcctccccagtagttgggactacaggtgcccgccaccacgctcggctaactttttgtatttttagtagagacggggtttcaccatgttattcaggatggtctcgacctcctgacctcgtgatccacctgccttagcctcctcagcctcagtgctgggattacaggcatgagccaccacgcctggccaagaatcttttgcatccagccacgcagcttctttatgttattgttactaaactgaatttatgttttcaaaatgaaaataaatgtgtttgcatttgaactttaatgttgcctcggatagttgaaaaatattaataattaaactgttcagctatatggatggaggacaaaaatggatcaggatttgaaaacaatgacacattttcgattttctcatagaattcagtataaaaacaatactatttctcacattccattaagtaggaaaataaatgttagtgcatgtttaattttgtgaaaaactggaacattttccttcatttctagttgttggatggggaactttatattaggttctttctgaactatttactgtgaggttgtaatttaaagtttgacctccaagatcaggttgcagggtgcagtataataactatggcaattagtgggaatttttgaaaatgatacatgacatgctctccttggcttctttcctagcccaagatgtcagcatacttcgtgttgggaaagaaggtgctgtaaagaggagaatgaacacattagttttagggggataaaaactgtataattttgtcagaccttgcctcacttcattctccaatggaaactactatattagtgcctaagatttatacacaccgtgacaccatgcagtgtcaggctttgcagctgagtctagtaaggaataccagaatttggaggaaagcagatctagttactgaggcaagtaggtaaactaggccagtagggtttctacagcttcacagatgctgagggtacccattcagaaagttagcatgagaactagaggacaatagcgatggatgtacttgtggtaaaggtgatgagatagtgaaaacagtgacagctgaagtcttacacatttgagggggtaattggttctgtttggattctggctttaaagcttatatttcacaggccacttattgaactttgataaacgttataaatcttgggagttgaaaaatactaatatgcttcctatggaccattcattattgccatgcaacaacaacaaaaaactatgtgcatatgtttgtacatgcactactcaagcttttcttttaaatgaatgttgcttttctatattaaaacatgtttgccatttcttggattataatatatcatgatttctgattcctatatttaatgatacaccatacattttaaaaatatctagtcattttatatggtcaccatatatttgagggaaaatgagtctcgaagtttattgtggaggaggtggagaaaaatcgccaaacagaagcctccagtaattatccctgttgcaggaacatcaaattgaacaactgtccacactagaaaagcaccttcataagagtgaaaaattaggtgcatgatcgtagtacctggtttttgggttgtatcacagaaagaggcacagaagagggtagtaaaggcaatattctatcacctataccagctctccctcatccatggcagcagtcacatggcatgaagagagagtctatgtgcttgcagaagggagattgcagtgattataggactttgcattgaaaatcagtgctgccctgtcacagtggaaaccgacaaagaacagaactcagccaaatcccgcagagggagcatttagatgaaccctagacagggaagaatcatccatcccagtgtttggaacctgagttccggcaagccttgtcatcatggattagagtgctctgtggttctaaataaacttcaaaggtagtctaggccacaaggactgcagttcctttgcaagtcctggtgctgtgccgggctcagagtcagtggacttgggatacatacaacctagtgagacatccgctggggcagctaagggactgcttgtgcttcccttcccccaaccccaggcagcacagctcacagctccaggaaagactccttccttccgcttatgaagaagagaggagacaagaaagagaactttgtcttgctgcttggataccagctcagacatacaataggatagggcaccaggcagagtcttgaggtccccattccaggccctagctcacagataacatttctgaacacaccctgggccagaagagagcctgtcaccttgaagagaaggaccccgtcctggcagaattcatgacatgctgaccaaagggacctagggccctgaataatcagcagctgtagccaggcagtacttgctgtgggtattgggtgagactcagagctgtgatggtttcaggtgtgacccagtacattcccagctgtggtggctacagggagagaatccttctgcttcaggaaaggagaggtgagagtaaaggggactttggcttgcagcttgggttccagtttgaccacagtggggcagagcatcaagtgggctcctagggtccctgattccagagtttggctcctggattccattttcttactgccctgaagggagagactcaggactgacagcattcaccacaggctggccaaagtggccttggcccttgagtgaacattggacctcagacagtactctctttggttcagtagtcgtcgtggccatgaggagagacatctctgtttgtggaaaggggagagaagagagggaaggactttatcttttgggtggggtgccagcttagccacagtagaatagagcaccaggtagatttcttaggttcttgagttgatatagtttggacatgtgtgcctgctcaaatctcacgttgaattgtagtaatctgcagtgtttgaggtagggcctagtgggagctcattggatcatgggggcaaatttttcataattggttgctactgtccttgcaatagtgagtaaattcttgcaagatctggttgtttaaaagcgtggcaccctccctctcactcttgctcctgctgtggccatgtgatgtacctgttcctccttcaccttctgccataattgtaagtttcctgaggcctccccagcagctgagcagatgccagcatcatatttcctgtacagcctgtagaactgtgagccaattaagcgtcttttctttataaattactcagtctcaggtatttcttgatagcaatgcgagagtggcctagtacagaaaattgttaccaagaagtggggctttgctgtcaagatacttgaaaatgtagaagctgctttgaaattgggtaacagacagaagttggatgagtttggagggctcagaagaagacagatgagggaaaatttggaatgtcttagagactggttaaatgattgttaccaaagtgctgatactgatatgcacagtgaagtccaagctgtcgaggtctcagatggaaagaatgaacttattggcaactggagtaaatgacatgtttgttatcccttagcaaagaagttggctgtattatgtccatgctctagatatctgtgaaagtttgaacttgagagtgatgatctcgtgtgtctgacggaatgaatttctaagcagcaaaatgttcaagacgttgtgtggccacttctaacaacctactctctgatgcaggagcaaagaaataagatggaatatttattattttattttattgtactttaagttctgagatacatgtgcagaacgtgcaggttttttacatatttatacatgtatatttaaaaggaaagcagaccataaaggttttcaaaatttgcaacatggatatgtggtagaaaataaaagcccattttcaggagaactcaagaaggcttctgagcaaccacttgctagaaaaatttgtatacctacaaagaaggcaagtgctgatagccaagacaatggggaaaaaggcctggaaggcatttcagagatctaaaaggcagcccctcccattatagatccggaggcctaagaggacagaatggtttcctgggccaggcccagggtcccagctgccctgttcaacctcgtacactgtgcccccgccccaacccctcccccccgcacccagcgtcctggccactgtagctccagctgtggctcagagtggcccaagtacagcttgggccacagctccagcgggtacaagccataagcctgcaggtgcacagagtgcaagagttgaggcttgggaacatccatctagattttagaggttgtatggaaaagcctgggtttccaggcagaagcctgctccaggggcagaaccctcacagagaacttctcctggggcaatgcagagggaaaatgtgggctttgatcccccacacgtagtccccactggggcattgcctagtggacctgtaagaagagggccactgtcctccagactccagaatggtagatccactgacagcttgacccttgtatctggaaatgaaacacacactcagcaccagaccataagagcagctttggaagctgaaccctagaaagccacaaagttggagtctgcccaaggccttgggagcacaccactcccaccagtttaccctggatgtaggacatggagtcaaagcagataattttggagttttaagatttaatgactaccctgctgggtttcagacttgcatgagacctttcttttgaccaatttcacccttttggaataggagtgttgactcaatgcttataatcccattgtatcttggaagtaactaattggtttttgattttacgggctcataggtagaagaaacttaccttgtctcagatgagactccggacttttgagttaattctggaataagtaaagaccttgggggactgtttggaagacatgattgtatgtttaaatgtgagaaggacttgagatttgggaggggccaggatggaatagtatggtttggatgtatgttcttgcccagatctcacattgaattacaatcctcactgtcagaggtggggcctgggtgggagccgaatgaatcatggcgttgaatttctcatgaatggtttagcactatcctcttagtgctgttttcatgatagtgggtgaattcttgtcagatccagttggttaaaagtgtgtggtaccctcccactcacctcttccctggccgtgtgacatgactgctcctccttcgcaatttgccatgattgtaaatctcctgaggcctccgcagaagcagagcagatgccagcatcatgtctcagggacaacctgcagaaccatgagccatttaagcctcttttcttcataaattacccagtatcagatatttctttatagcattgtgagaatggcctaatacatgaccccaggccctggcttacatataggatcttgcaaacccaccagggaaaaattgctaccctgaagtgaaaaacacaagcttcattggatttgccacctgccgattgtagagtccttgggccctgagtgaatgtaggtgatagccagtcagtggtcagtgtgggccttgatcaagacccagtgttgtactggctttaggagtgacccaacacaatcctagtcgtggtagctacaggggtgcttgtgtcacctctcctttagctccaggcagctcatcacagagagagactctctttgttgaggggaaggaaagagaaaaagattatctaccaggtaatacaggggattttcctgaatcttcccaaagatcaccaaggcagtacgtttaacagtctgcaagagtcacagcattactgggcttgggtgcaccccagtgcatatatggctgcagtgaccaaaggaataaatcacaacacccaagaacctttaaatacctggaaagccctcctgagaagtatggatacaaacaagccgatactgcaaagactacaataaataccaaagtcttcaatgcccagacattgatgaacatccggaagcatcaagaccatccaagaaaacatgatctcaccaactgaactaaataaggcatcgctgaccaatcttggagagacagatatgtgacctttcagacagagaattccaaatggctgatttgaggatgctcaataaaatccaagatagtacagagaaggaattcagaatcctacacataaatttaacaaagggattgaaataaaaagaatcgaacaaaaattctggagttgaaagatttaactgacatactgaagaatgcgtcagagacgagtaacagaagaattgatcaagcaggagaaagaattagcttgaagacaagctatttgtaaatacagtcagaggagacaaaaaagtcctaaaaagtttattgaagagggtaataacacagaacttcccccacctagagagagagattaaaattcaagtacaagaagataatagaacaccaaggagatataatataaataagactacctcagggcatttaaaaatcaaacttccaaaggtcaaggataaagaaaagatcttaaaagcggtaatcatataaaaaaaaaaatcacatagaaatagctccagtatgtctggcagcacaattttcagtggaaaacttccaggccaggagagtggcatgatacatttaaagtgctgaaggaaaagacttttattctagaatagtatatctatgaaaatcctcttcatacttgaaggagaaatgaagactttctaagacaaagaaaagctgacagatttcattaacaccaaaccttttctacaagaaatggtaaagggcgttcttcaatcttaaagaaaaggatgttaatgagcaatgagtcatcatctgaagtaacaaaactcactggtgatagtaaggtttgttactattctgttacaaagagaatattataacactgtgattatgatgtctcaactacccatatcttgagtaaaaagactaaaagacgaacctatcaaaaataactgcaacaacttttcaagacatagacactataataagatataaatagaaacaacaaaaagagtggggggatgaagttaaagtgtagcattttttttttttttagttttctctttgcttatttgtttatgcaaccagtgttgtcatgaatttcaaataatggattataacttattctttacaaacctcatagttaccacaaatcaaataatgtactcaggtacataaaaattaataagaatgtataacatatgaccagagaaaattactttcattaatagtaagacaggaaggaaagagagaatgaagagaaggccacaaaacaaccagaaaggaaatagcaaaatgggaagtgtttaagtccttaacgtaccaatgataacatggaatgtaaattgactaaactatccaatctaaatacattgagtgacagaatggataaaagaatatacaagacacaataatctgttacttacaagaaacacacttgaccaataaagataaagatagactgaaaataaagggatggaacaagtattccatgccaatcgaaaccaaaaaagaacaggattagctattcttttatcagacaaaataggtttcaagacaaaaactataaaaagggacaacgccggtcattgtagaatgataaaggggtcaattcagcaagaggacataacaattgtaaataaatatgtacccaacattggaacacccagacgtataaatcaaatattattagagttagagagatagaccccaaaacagtaatagccggtgatttcaattccccattttcagcagtggccagatagatcatccagacataaaatcaacaaagaaacatcagacttattatgcagtgtagaccaatttgaactaatagatatttacagaacattttatccaacagctgcagagtacatattcttcttctcagcacatggataattttcaaggacaagccatatgttctgccacgaaacaagtcttagaaaattcaaaaatcaaaataacataaattagcttttctgatcacaactgaatatatcaagatatcagtaggaagaattttggaaactatagagacacatggaaattaaacaatatgctcttgaattatcagtgggtcaaagaagaagttaagaaggaaactatagaatttcttgaaacgaatgaaaaaggaaacgcaatgtaaccaaaacctatgggaagcagtgaaagcagtactatgaggaaagtttataggtataaatacctacatcaaaaaagcagaagaactttcaaataattgaatgatacaccttaaagagctagaaaagaaggagcaaaccaaacccaaaattagtatgagaaaataaatattacagtaaggaacagagctgaaatacattaaagtacaacaaaatgatacaaaagatcaacaaaacaaaaagaaggtttttttgaaagggttgacaaaaatgacaagtcttaagcttgactaagaaagaatgagatccagtcacttacaacaacatggatggaactggaggacgttatgttgattaaaataagcccggcacagaaaaacaaactttgcatgttctcacttacttgtgagagcttaaaaaaaaaaaaaaaaaaaaaaaaaaaaaaaaaaaaattaaaacaactgaactcatggagatagagactagaatgatggttaccagaggatgggaatgctagtgggtcgggggcagtggggatcattaatgggtacaaaaatatagttagattgaatgaatgtgatgtagtatttgatagcacgacaggatgattactgtcaaacataatttgttgtacgttttaaaataacaaaaagtataattggaatgtttgtcacataaagaaatgataagtgctcgaggtgatggataccctattaaccctaatgtcatattatgcctgtatgcctgtatgaatatgtctcttgtatcccataaatataaacacatactatatacccaaaaaaataaaaatttaaaaaatagggtattgtggtttctatcattaaagtaaacatcatgctaagaacaattgtctcaagagtaacaactgtaattttcgttttggtgaaaataataaaattattaatgacaatctctgtataaaattccaccaaatgaacttctgttttctatttttttaatatttataatcagtgccataaatgactttataatagatataaagttaatctctaaaaagttaattttagttcaggcaatattgcatgattgtgaagcaggccccggagccaaactacctgagttcccactttgtcaccttcccttgtttgcgttttgacccaagtaagcctttgtttccccacctgtaaattggggctaatatcagttgctgaatcaataggattaattacaataatacctctttttttctgacacacaattattattttgtatttaaaaattatatttaaaagccccaaattctacaagatcaaaattactctttagtaagtcttcttttttatttgtaatttctgggggtacataatagatattttagtacttgtggaagtcatttataaataagtaaacgcatgtttgtgcatcctgatcctttgtctccatgttacctctgtgcatctggttcatgttaaccctaacaagtcatgttgtctggatacagctttccaggtatttgccacttgtgaggacccaagggctaaagtaaaaattatggctgtgtcctggggcgggggggggggcggggaagaggcacaatcgttctcaaccctggatgttcattcgaattacctggttggatagttttttacagaaccaatacctgggctccattcccagatattctgattgaattgttggggaatggggctgggacgtcattttgaaaagttctctcagtgattctaatcaattagtacctttttatattaaggcattatttatataaattccactaattcacctatctgtgatagtttgaataaaagccggacttaaacattacctcaattaataactttctgttttttaacctatcttggatttcttttcttttttctctccctcttttattattattattatactttaatttctaggatgcatgtgcacaactcgcaggtttgatacataggtatacatgtgccatgttggtttgctgcacccatcagctcatttacattaggtatttctcctaatgctattccttccccagcccccaatacctttcttaatagagaatgaaacaaaagctgaaacaaagttgattttaaaaattacttatttaagcagatgacagcattctagaagcatctagttgcatataaagaattgttaagctaaaaccaaaactaatctatctataagaaccaccttgctagaatttttgagccatcgttttgttatttttatctatttttttaagacggagttttgttctttcacccaggctggagtgaagtggtgtgatctcagctcactgcaacctctgtccccccgggttcaagtgattctcctgcctcagcctcctgagtagccgggattaaaaagtgcttgccaccacgcccagctaatttttgtatttttagtagagatggggtttctattggccaggctggtcttgaactcctgacctcaggtgatccagccacctcggcctcccaaaatgctgggattacaggcctgagccactgtgcccagcctgagccatcattttgaataagtaaataaatcaattccaattttcatcagtacaattttagtttctaaatggcgtgcatttaaaagtaaaaacatgcattaaaaattaagtttctctaatttgtactggtatctttcccttaaatcatattatacaggttttatttctgacttaaatcatgtaattgtattttacatgtaagacatgtcaattgaacatcactggtagttcttttctaatctagactttcattataatacattacctccttttattaggtgtatttttttaaattgaggattgcatatatgccagtaactgtgaattctagggaattgggcctgagagcctgtcttcctaaagagctcacacctcttggtaatttgtaagttttaattgtagtcctctaggttttataaagtctatccatttatgcctttattagttagtgcctagcatatgattatgttttcataatatatgtttatacattttataatgtatttccataaagcacaaaaaatgctattaggaccatcaaatacaggctgaaattaatgaaaacatgtactattttgcatttataaatttgtatatggaaaatgaaaattttaaaaaatgctattaatgtttattgctagattgctaaacttaggatgtcattcctcatagacattggaggacaaaataaattggtatggataagtacttgcaaataaggattcacggatattggtaatctaattatctgtcggtttatagctgtgctgtccaatattgcagccgctagctatgtgtaggtaaattataattattataattaaatatagttaaaaattcagtttctgagccttactagccatacatatttcaagtgttcattattcccacctgactagtgtccattatatatgtatacctatagtgcacacatagaatatttacatcattttagtaagttctggacaacactggttaaagaataattgccttcctacattctttcttttttgttttttgaaacggcgtttcactctgtcactcaggctggagtctaatggtgcgaactcagctcactgcaacctccgcctcccgggttcaagcaattgtcctgcctcagcctcctgagtagctgggactacaggcatgtgccaccactcccggctaatttttgtatttttagtggagatggggtttcaccatgttggccaggatgctttcgaactcctgaccttgtgatccgccgcctcagcctcccaaagtgatgagattacaggcgtgagccatcgcacccagccgccttcctacattctaacagagtttctgtaaagcaaagctggcattcccattgaattcctttatgttcatacagatacgttttcatgtccgggggtgggatgacagctctcgagtaaaatcatttgaaaaatactacgtcttagaatgccatttactgcaaatgacaaaaaggccaactcaaagtgacttataccattgctccttaaaatgtgattaatggatccgaagcattgatatcccttgggcagttgttagaaatgcagaatctcaggccccaacccaggcctactgacttagaatgcatagtttgacactctccaggtgattcatatgtacattaaagtttgagaaacactgggcacaatcataaggatgtctgttatctaacaatatatcaaaaatgtcgttgacgctagagaccattaggtctgtaactctatgttgccaaagttccaagttcttacaacttatctgttttgctagcccctctctattctcagatgatctgaacgattggaagtttaccgtagcagttcctagtatcatgtcctgatatgcttttgcctatacctactgtcaggaccaactcctgccctatactactttattctaattccactccctcggctctctattgccagtcatatatgtatactccattcaccttttgcttttactttcccgtctaaatgacgacttgaaggatataaaatgaaacctggaaaaatgcaaacattttttcctatctgtgcatggtagatttttattttgtgactttgacaatttttccaaatttatttacatctttagaatgttagctggaaataagaaactcctgtctcattttcatcatgttttaaattgaactatatgaagccattttcatcaacaaagaaattgaaatatcagaaatttcatatgatctaatacaatattttgcccatgaaaaaaataaaatagtgcacagtcttgggtcacacagggtttgtgatttctatactggcttcacatgccactgtgccagctctttaacctaccactatcctcagaaataaaataacagtagctaggtgcggtggctcacgcctgtaatcccagaactttgggaggtcgaggcaggaggatagctggagaccaggagttcaagactagcctgggcaacatagggagaccacatctatacaaaaagagttaaaaatttgccagggaaggtggtgcacctgtagtctcagctactcaggaggctgaggcaggaggatcatttgggcctgggaggtcaaggcttcagtgagttatgattgtgtcactgtactcgagcctgggtaacagaatgagaccctgtctcaaaaaaaaaaaaaaaaatactagtattataaatctttaccttggcaaggttatgttaaaaaaagttgaataaatgttagccagtgtattttacaactaatattaatgacattttaacccagaggttaacctccccactccctgaagtcacccctttatttaaaccatctttgggaaaaaggacatttgtgtcatgaaggctgttaaactcaccttctgatatcagtgcctccttcaattttgcttcttcctctggttcagccttgcaatggaccactactcacttccttgctaatcacccagaaaactctggcctataattcacctgcactttactgatgctcttttcacaggcctcagtgaaggaaggaagcgtcctcttcattactagttatttcaatctttagagtttttcacatatcagtactgtaataaagcccttccttactttactgaagggcatacttgggcattctgagtctgataccctttgatacttccctgccagtgtcacataaatctatatcttctgagttttagcagtagtaactaatagatcgaacacataccttaagtagactagcagtggttttcaaataaataatattcttacctggaatgttgtcattcaaagtgtgatccatgacccagcaacattggtttcacctggaagctggttagaactgaattcttcgacccaaccccgtgaatttaaatcagaatcaccaggtgggctgtatccatatttaagtttgagaagctgtgatcaagaccccggggggcaccaaatccaaatgcctattgtagaagccagaaacataacataaggaagtgagatgagttgcgtataaaaaaggatagggagtgatgaggactacagcaaactggagagcttatactttgtatatgaagtataattggatgcgaagtataattggatgtgaagtataattgatactcaattttgtcctataggaaggaaggtttagggttgctgaatcctattaaatatgatcaagagtggtcagatttgatatttgtagctaatatctcaaattttaactactggcaaaaatttcaatttattttcaattagtatgagaccaaatccagcatatggactactatttgctaatatctagtcaaggcctgtagtaaggaaaagaaatattttctcaattaaaacatctcagaatcctttccaacaatgggatgaatgctttttgttttcgtgcttattagtatcacacctccacaatccttaggttcttctgttttcaaacttgttctgaggttaatttcatgcttcagacacatgaaatcctgctttttggagcctcaggtagaacccattctttggcagttggcagtcacacttctctctgtaagtggaggtgaagtcaggaagagaatgtaaaagtctcatgtcaaaataattcatagtaatctcctggggattggcagttgtcctcctattaatgttaatatcttggtctctgcagaatttgggtgagttgtgtttgtagaataaagttacctagagcagtaattttcaagtgtgagtatgcatcagtcacctggaagtcctgttaaaatacacatttctagacctcatcccagagtttctgattcagtaagtgtgagtcttgcacacacttctagcaagttttgaatttgcacttctagcaagtttctaggggatgggctgatgctgttggtccagggtccagtaaccacactttcagaaccactaatgaagagagaaaaagcagggctctatttggctgggagacattgatgtgactgtaccagtcattaaaatattgagccatcccgtttgcacacacccagccattctggtccctaccccaaaaatccccaaccagatgtttctgtatcccacttataaagagaaaacacctggctgggttcggggactcgcgcctataatcccagcacttttgggaggccaaggggagaggattgcttgagctaaggagttgaagaccagcctgggcaacataatgagaccttgtctctattaagagaaaaaaaaaaaaagaagataaaacacttatgtgtacatctcttcttattggtcaatctctgagtccaagtttgtaaaatgaaaccacgatagaacatgaaagattactgggtgttcaaatttcagatttggggcagagctcaagaaatctctgtggacccacagattaaggtaggctatgatactgtacaaccatcctgcaccttgtgcgatcaagctgcactggatttccggttcctctgtgatgtgacagggcctttcacaggtctttctttccgtctagaaagagtttataccttctttttcactacttctgacttcagtcttcacagttgtccagtactgcactaaaggcccccctttacagactcaattcaattgctctcatttcatagtatgatcacattataaccaactaatggcctgttgagctatatgtattatctgtggccctcacccgccatccatataaactccaagatagcaaggggctgtgttggtcttccttgcctctccatccgtagtatccaggtactcaataattgtatatttcgtaaattaatgaatgaatttttcaagtctcaactcttaggctgtgtgttctgcgaggacactgttcccaatgactgcaggtcaatttgtatcctctccttactccctcaggaatgtatataaatctaattataatggatttcttatattctaattatttttgtatttatgtctctaatagtctctaagctacttgaaattgaagataggtattttgtccattcctaacaaatatgagtttcctgcatagatatgaaactcagtaaagatttgttgaaggaaatgtctgtccaaaagcaaaaagtaaatgatgctttcaaatactagcaactttcagtttttgcttccacttaaatggatatctcatctctgttgtttctcataaaaataaaatgtctactttttgtgtttgataaatgaaagtttattctcataacttctgattgcaatgttcctcatggtaaatgtgtctctaaaatgttaaaagtcaataaatagtgcaatctaaattattgtaaacactctcaaaaggaatatgaaatgcatattggaagaaagctctgataacaaccccaatacttcggaccagctatggagccattatcttttatattttattttactggtttacttcccctgtttccctgtaattttatatgaagagtgtgagtggtatgtaacattacatacaggttccatgttggggtttaaatagcctggcattagtgtatgaggataaagatgctgatggaattttgtatccttttgttttaaatacacttatactaatttaagtattttgatagttactctgtttagcagattcatttcacttttctccttcttgctctgttcaaagaggatgaagtctagattttctgttacccaggttcctcttggcctttggttgctaaagtacttcagccaatgggaggcactggcaagagggtgaaagcagagattgtggtacttttctcttcctcttctgtttcttactgtggagtggctggaattgtgttcctcttaaactacagctactgttggacagctcttgttccatgtctctaattctcactgagctccggcaacagctctcttccttttttcttccagttccggggatgctaggtcagttgtctttgttgttaggtcctggctccttcactatcgtttattatttttcccccgacccttcacataaatgtgtaagtagtctactgagcgaaacatatttgagtgtgttctatctttcctgccaatagtatgcagcatccacacacacactcaacagacccaacttttatattttattgtttgaaatgctatcaatttctaaacattgctttttaaaccctactttaaattgacagataaaattgtatattcatcatgtacaacgtgatgcttctgagtaaatatatattgtggaacagttgaatctagctaattaacatatgcattaccttacatatttatcatttttatggtgggaatatttaacgtcctctctctctacatttttcaagagtatattttcattagctgtagtcaccatgctgtaaaatacatcacttgaatattttgactgtgactatatatcccttgaaaagtatctccatacctcccccttccccataaccacctcagcctctggtaaccactattcattccctacttctgtgggatcagctcttttagattccacatataagtgaaattaggcagtggttttctttctttactggcttatttcacttaacataatatcctccaggttcatccatgttgttgcaaatgacagtattttattcttttttatggctgaatagtattccattgtatatatgtataccacattttctttatccgttcatatgttggtggatatttggattgattccatatcttggccatgaatagtgctgcaataaaaatggtagtgcagatatttctttgacatactgatttcatttcctttgtatatataattcatagtgggattttgtatcatattgtagttttgttgttcatatttcaaggagccttcatactgttttccatgatgcctgtactgattgccattcccatttacagtgtgtaaaggttttcttttttttaattagtaatttttaacttttgcaggtacgtaatacatgcctttttcctaaatcgttatcaacatttatctttttttgttttggatagtagccatgctaacaaaagtgaggtgataatctcttcttttttcttttgacaaagatatcgttaattactattatattttaacttttaggtgcaagggtacatgtgcagttttgttacatgggtaaacttgtgtcatggaagtttattgtacagattatttcatcaccaggtataagcttagtactcattagttattttttcctaattctttccttctgccaccctccaaactccaataggccccatgtctgttgtttccctctatgtgcccatgtgttctcatcatttagctcccacttataagtgagaacgtggtgtatttggttttctgtttctgcgttattttgctaaggataatggcctccagcttcatctacgtttctgcaaagaacataatcttactctttttcatggccgcatagtattccatggtatgtgtttaccacattttctttatccagtttaccactgataagcatttaggttgattgtctttgtgattgtgaatagtgctgccacgaacatatgtgtgcatgtgtctttttggtagaatgatttatattcctttaagtgtatacacaataataggattgctgggtccaatggtagttctgttttgaggtctttgtggaatcaccacactgttttcaacaatagttgaaataatttacactcccacaaacagtgtataagtgttcccttttctttgcaagtaagctgatacctcattgtggttttaatttgcatttcccagatgattagtgctgttgagcattttttcatatctgtgttatccatttgtcccttttatgataaatgtctattttggtcttttgcctatttttaatcaggttatttgttttcttgctatggagttggttgaatttcttccatatttttatatgaacccccatcagatatatagtttgcaaatatttttctcattctattggatatctctttactctgttaatttttaattttaattttaatttttttgctgtgcagaaatttttagtttggtataagtcctcagtctatttttgcttttgttgcttgtgcttttacagtcatattcaaaagttattgcccaaataattgtgatgaagcttgtcctctatgttttctactaatagattgagagttttgagtcttaaatttaagtttttaatccatttcaaattggtttttgtatgtggcaagggataagggtctaatttcattcttctgcatgtagattcttacttttcctggtagcatttgctgaagagggtgtcctgtcctcacggtgtgttcttgacacccatgtccaaaatcagttgaatgcaaatgcattaatttattcctgggttctctattatgttccactgatcagtttttatgctaatacaatgctgtcttggttactatggcagaatttcttctagttgcgtactttgaccttagtgggaaataaaaaacatccttccaaagaaccatattattagtgtttccatattgatcgagtatcttctgttttttttattggttaacactatcatatatgggtatactaagagactcctggcaaatgcccatagttttctaatgtagtactacttgccccgcattgtattgggtgaactcagttgaccatttgtgcttaggttctgtatggtaacccctttctctgtctgtggattcagcagcatgaggagccaaacatgaacagcggtcatctcaacttctagtttaaagaaatcatttttgagtttcttataactcaaaatgttgaagaggtagttcaaaaaaaagttgaagaggtagttcacagataaggaacagaagtcacaaggtggagagagatggataaattaatattaggttaatacagatgagataattatatatagaagtatttatgggtgagtacacactcacacatccacttctttatgtcaacccagaggtcctgtaagctacaacaccctagaagcaaggagcatacctagcaacaggatcttgggtttcagtaacattctttaaagaaaaaaaaaaaaaaaaaaaaaaaaaggaaccagaacactgtggagaaacagctgattctaacactaggaaagggaatatagaaaatgagcctggaacatttggtagtgccagatagtaagaacatgctaaactccacggtctcgctctaaacaaaaaacactgatgggatgtgtcaaagaagccaactaagagacttcccaatgtccaaagctggaactatttgagcaaaaatccaaagcaaaaactagtattggatttagcccaaagtatcaaataactatacatgagtccatgctatgtaaataaataatttcataaataaatggaggaatagagacaaatctccaatgcagaaaaaactccaaaaacttatgtaacttctctgccctcacggagagggaatgtaactccccactccacaggggctgtgtatagtgactttcttattaaaaaacagtgtgaaaagagggggaaagagtaactttatagtggataaacatgacacctattactttagccaggtggtcacatttaacattgataagtcacgttgagggtatatatgctttataaaatgtgcttaaaatggcccattacttctgtggtctttcaaaaaccccagtttaattatgaggaaaaaaaatcagacaaatccccactgagaggcatactacaaaataccagcctggccagcacttttaaaaactgccagaaaaattctgagaaactgtcatagccaaaagcagattaaggaaacaggacaattgagtgtaatatggaatccttggagagatactgaaatacaaaaaatagtttaaggaaatcagaatataataatagtctccagctaatgcacaaatattggttcattaattgtaagagatgttccataataacataagatgttaataaaacgggagactgagtgcaagttatatgataactctttgtattataatctcattaatttttcgtgaatctaaaacagccaaaaaattaaatctgttaaaaaacactctcagctatgtgtgcactttgtgtgtttaaatgtgatgattaatggaaacttccagtaaagattttagagtaaaattatgtattcaaaataacatattcctaattcaaattataagatcaatgttcagaatatagttttgaaaaatgctttaaacatgatgtttataaagagtatttcctttaaaataaccatcagcacttctcatttgcatctcaaattttggttgaattaatgaatgaacaataatgtgttttcatcctcaacataaagttgtgtaattaataggcaaaacattatcccatgtccctgatgctggaaatgtaattgagaacgtttaagaacctggttgtagagcttaccgctgggctgtgaacctaggcctttggactttaaattcattacccagcccactattttctatatctttgtggggaaaaagcaccctttctctagtctatttgtgtgtatcaaatgacgtccaaacttaatgggttaaaacaatttataattgcgtcatgatctgaagaccgagaatataagcagggctcagccaggttgtttttatattactagttttatagctgggggtcaccccttgggctgtgctgagctggaagctcacttctaatacagtattttatcctgcagaatcactcctatatggtctctaatgattcggtagtgtagcctggcctcctttacagcatggaatctaggcttcaagagaggaagaaatacaaatgctgccagttcttttatagcctacacttggaattggtgtggtgtcagttatgccacattctgtggtcaaaaaaaaaaacacaagtccagatcatattcacagggatggaaaatagacctcatctcttgaagggaaaagtgacaaagaatttgtggccatctttaaccaccacacatactaaataatgagaatgtaaacgaacaactgccaaaatatactacttagtcaattatcagatgctttgcacttcagttagcatgttcacatttagttgactatgtgaaagtttttagaaatcaggatttgtgaactattataagtctgagaaataatagttccggggtgactgatagtgggctttacttacatccttctcaatgtccaatagatgcccccaaatgcgaacattccatatattataaattctattgttttacattgtgatgttcagtaataagttgctttcaaagaggtcataataggcttctttcaaattttcagtttacatagagttttaatggatctccagaatcagaaactgaaagagttgaatgactggctaacaaaaacagaagaaagaacaaggaaaatggaggaagagcctcttggacctgatcttgaagacctaaaacgccaagtacaacaacataaggtaggtgtatcttatgttgcgtgctttctactagaaagcaaactctgtgtatagtacctatacacagtaacacagatgacatggttgatgggagagaattaaaacttaaagtcagccatattttaaaaattatttttacctaattgtttttgcaatctttgttgcaatggcttgaataagtcccctccaaaattcaggtgattgtattaggagatggaatatttaagggtgaataatccatcagggctcctcccttaagaataggatcaagtcccatataaaagaggcttcacacagtgttctcctatctcttgaccctccaccatgcaccaccatgtgaaaactctgtgaaaaggccctcaccagatgctaacatcttgatcttggatttcccaaactcgagaactgtgaaaaaataaaggtacattcttcctaaattacctcattctcagttatttttgttacagcagcacaaaatggattaagacatttgttgttgtttttttaaaaaatacagcatagctaggcttttcgtatttggaaaagaaatcaaacatatttgtggatgagaacaacgcagggtatgtgatttattaaaaatttgctttcctggaagacagacttcatagggattacttgtaatgcaaatttaaataataaggctacgattttttttaatgtaattttacattcaatttatagtaaattgaagctggccaagcttgatgataaatgagagtctgaagcattgcttttctatagaatatgacattttttaaatgttaatatttccatcttttttcttcagtttacttgtacatttccagttatgctccctcgctgccagaaagcatttttttttgtttctgttattgagacttctacaataatatttcttatccaaaattatgagggtgctttattttaataagtgccataaaatattacaattagctctgagttttattgttgaaataggctcctgctcaattcatgaggaaacacacacacacacaagatcctttgtaattgtcccaggattagggttgccacatttagcagacacaaataaaagaagcctacttaaatgtaaatttcagataaacaacaaataattttcttagtgtgtgtcccaaattgttcattgtttatctgaaattcacattttgctgagtgtcttttattttatctggcaactctacttatgatctgtggtttttggatttatggctttgaataggaatatctgctcctttacctcataccttcgaaatctgccttttgtcaaacttaattctctctttttataatattcagtcatatatagctttacagttcttccatgcaaatgaaagatacatttatttctaagttctagagttttttttaagtttaatgagcttcagttttgaatgacaaatggggccagcccttactattattgacccccaggagtcctctaagatctagcatttaagaagaactgtaactatggtaatccccgtctgctatgccatcaggaaaaaaacatcaactgtattgcaattatgtagaaattgtaactgtgattacttgtcatatagatactaattgagcacctgaagaagaagttaggtacagtgctagttctctaaccgtaccgcttttccgatgtggcacatttgcttctctcgttgacactatatctgccctctttcccttggcctacactggaagttacatgcagaaagtgtctatataaaccaggggtgtccaacccgttggcttccctgggcgacattggaagaattgtcttgggccacacataaaatatactaacactaatgatagctggtgaactaaaagaaataattgaaaaaatattttaagaaagtttacaaatttgtgttgggccacattgaaagccatcctgggtcatggattggacaaggttgatgtacagcaatggcttctctctaccggagggtatttctggtgcagaaccatttcagccagtttgaaggtggacaggaagtggaattagtgccaccagagctgcccttagccaatgaggagtaaaagttgatagagaaatcctgtagaatctttgtcccatagtgggacatttctaaggtatattctccacagtctttcagagattccccagtaagactgagctccaggtatccacagggtaacttcctgaacgtccccgtgctctcataatgccttacgagttcaccctccaaataaaccatttatttgttcacaaatcttttgttcaggatgtgtttttggaggaatctaacccaagacaaacttctcccactagaagccagaattcgagctccagttctaccactaactaaattgtcattttccaaacatcacttaatgtcccaggttctctgtatctttactttggaaataaaagagtgagtttgtttctagtgttccttccagtcacagtttaaatgtgtccaatacttttggaagttgaagtattttagaaaaggccaagattaggccacgtaacactgaacatcagaaggcaggacactgctgctggatgcctggagtgtaaagcgaaatccagggagaagagctccaaaagagcagtagaagaagaatgttagcatagctaagtacggataacctagggcagctatgaaggaagttcttagcttgggacgctgaacagactcttcattaaggtgagacaagctatccaggatcttaatattctgccaggtacctgaaatgttttgtagttttttctgaaagatataatgtgaatgaaatggaaaacgtttgacaaatattgtcataaaatttaaatatattattcattacttgaaagtatgccatttctaatgactatgaaattgccttgaagaaaaaatgtgaaacaaaagaaggcaacaggagtatatgcaagttgattatgtaacattttacctccaggcattatttatttatttaaagggcataaagaggccagaaggcattggttttctggctcagagagtaaggccaactcctacttttaactatttgagcactcttttttttgacagatttgacaatattttttgaaatatttgacagattttttttttataaaaattaagggaaagattcatattcaagtcctgaatattgataatgctcttttgtttcttggcaacaattttggcgagaagaaggtgacttaacatcaaacaatttagcaaagagttgactttatttaaacctgaaacatgtacattatattgtcttttaagactaaaaggagcatacatacagaattaaaggaacactgttttgttagtcttgccacacttcataaaacaaaagaaaataaatgttacttctttgggtaactgagttcaaactaaagccttatttatatagtcgttgaatcgctttgcagctttttttcccaagaattgtaaatcattgaaagtaaggaaatttctccttctgacaacaaaatgcatcagtaaccttagagtccccacaaaagcaactcccatctgctgcatcaccaaacttctaacctaatataatatttatttttagctttgtgtagatagacattaaatccttgtgccatcaccattttttcttaaagatgattgcagatgacaaaattaaagaaaagatacagattttattgctgggaattgatttaaattctgctcagatcagaggtcgcctgctctctctctctcaactggagggcaagattaaaatgtttgcaaatcttgcaagtacactgtgaatattacagatatgcttctgtatattctgtgacaggatcctttgctatcttcatttcaacagcattttattatgaggcaggctagaaattcagacactgtgaaatgtcaggaagataagtcacttttactgaacctggcaattaggtaaggtaaagcaattgatcctatatggtggttactattaaatctagccaaactctttactctgggtaaccaagaaaagttcaattggctgcaccatttgggagaaaccactcatccttcatagacattgctgtagggagagaatttagaggtttgctttagctttgaggcacccaagagtgagtctttctggggagtaaacaaatcgaacctctcattcccctgtgaaaaaatatatcacatataattctagctggtcttttttgtcttaaggggtagaatttattagtgatgttgacaaagaatgaaaggatttccctcgaaggagtggcatgatgctattgaggaggaaaagccttgagctttcattaatagtaaagaagtttgccattttggaggcatttttttcaaaaggaaaatatttaacagtgaaatcttttgtctcctggcacagtgagactgcgatgaagtttaaagctgagtttactagctaggttttccattcttttgagagatttagacttttgtgcatagatgcataaccttggtgacagcatcaacaaagactttacaaattacaagaatttgccgatgtgaatatatactctatattctgacttcagtgaaggttatatgtgaaatactgattaatacaaactaagtagcctcttagaaactcagtcacctatccttttcttgaaggttagttaaaggcagacatttgggttgccaagattgtgaaatatcctcatctggtgacctttaaaatgatctagatgttcatgttacagagaaggattaggtataattctgccaaaggatctgacatttcatttcattccattgcattctattccatatcactgaacaaaccctcattatagcacatgggtgctgtgaagaatgcagaaaccaatcatttacgatgtcttgtactatactgaatgctggaggatttaagcctgatcatggagggtgatcatgagtcttatataaaagactcaggcatttgcagtagtagttctatgagtaacaggaaaccattattcatgagaaattaaactagaaatagcagcaatttaggaaaacttatcttaatatttaagaagatattttttgaggataaataaaagagcagagaaacaggaggccggaaaacatgttaagaggatattgctgaaagtatatagagcctgaatgaaagcaatgacaacaaaaattgtaaacaggtacaaagcattctggatatcaaatcaaaaccaataggactagatttaggatatgaacaaaaagctcaaagtaatagattctgggactgggcaattgggacttgagattggtaattaagaaaataggcagtgaaaaagagaaatgcaatagttggaagaaggataagtgattcagttaagtttgacagtgccataggatcaagtggtgcttttagtggttagcaaactcactctcatatttagcaaggttaaaattacatgttgtttgtttctgctatgaagtttcattttatttcctgtcttttgccctcataagtgcttaatgaaagtttaatggttatgatggtaagggggataaacactataatctgaaaaaatactgtattataaccagagagccagatttcttttgtgttttcagagtgcttagtcaataattgatgctcagtaaatgtttttagaacacatgttctgattatattgactagttttattatccaaatcgtctccatcatggctaactttctgacaagggcatgaaagtttgataatttcaattaaaacgttgggcatacagcaaaaaaaaattcataaagctgtagaaaaatacatctgtaaagtggcttacctggtgatgttatctctggtgtcttcaatctctgactttccttttttccttctatctctgttgcattcccatatgcaaatatcttaatagtgctaaaccattgactatgaaattggtttgagtggtagtattattttgacataaatgattggaagtttatgtaaaaaagaacatcacacttttatagtctacgtagtagtatgtgcatgatattcagttacaatttttaaaatcgaattgagaagacatctaatatcccataagaattctattaacaagcatcatattccaagggtatatttgcacagtaatgctatagattattaaaataataataatataaaatccatgcccatattcttattttacaaatcaagtatttctagctatcagattattatttactttattagaaattactgagtattgattcagtaacattacttagaatgtcacagctttgtttgacagtatatcggtatagctacgaaaattatacctgatcaagactctgtcatcttagaggcactaacattagttattatacttcattactcttgtaatacttcctcatgagaagacactgacctctccaatggtgtttaaaggaaaaaaataagtaccctatttctaatttactgagttagtctcatgtaaaatgtctctctctctctgaaccagtactgtaacaatcaatttcagttctttcgtataggtaatacaaaattaataatgtagataaactaattataaaaaacattttaaaatgcattttagggaaaccttacaagaaagctaagacacacatgataacatgaattttaaggcaataattttccttatcaaatgtatgaccgtatcttataacaaaatgcatgtccgtaaatccaatcccgtgttaaaatataaggttgaatatgatactttttctgaagaatatggagaactatcctgtttaatatttctgttatgaacagaatttctagtggatttctaatactagtagatttctactggtacatctggtagtactctcttattcattggaagtaatgatactgtatcctttaacaattaaatttttatctaagtcatatctagtaagactaaaaaagcactaaactatttttacataatggtctacagttttggcacactgaggatatttaataatggaaatataatgtgattaccaagttattagaaataaatagtgatgctcaaaagggctatttccatgaatctcagtgtaagaatgcaaggataatgtgaatacgtcagaaatgaaagaaaataagcatttcctcaccacctaccaaatctaagcactgtacaagctgaagttaatgtattgtctcatttaactctagtaataagcatgtcttagaagaagttttaaaatagattgagggggtgcatgtgcaggtttgttacatggatatatcgtgtagtggtggagtctgggattttagtatatccataatctgaatagcgaacactatactcaataggtaatttttcacccctcacccccctaccagcctataatcttttgtagtttccagtttatattattccactctagatgtccgtgtgtaccctttgtttagtttcttcttataagcgagaacatgttgcatttaggtttctgtttccaagttacttcacttaggataatggcctatagttcctattcatgtaactgcaaaagacaggatttcatactttcttaggctgtgtagtgttctgtggtgtgtgtgtatatatgtgtgtatatatatgtatgtgtgtgtgtatatatatatatatatatatgcgtatatacacacatatatacatgtgcatatcacattttctttatccaatcatttactgatggacgcttaggttgattctttgctattgtaaatagtgctatgataaacatacaactgcaggtagctttttcatgtaacactttttgttgtttttgttgagtatatacccagtactaggattgcaggatccaatagttgtgttttaagttctttgagaaatctccatactgttttacataatgtttatattaacttacattcccaccaagagtgaataaacattttcttttctccacatccttgccaacacctgttgttgtttgacttttttaatgacaggtatccccttaaaaaaatgagatactgtcatttggaacaatgtggatggaactagagatcgttatgttaagtgaaataagccaggcacagaaagacaaacatctcttatgttctgacttatttgtgggatctaaaaattaaaacaattgaagtcatggaaatagagagtagaaggatggttatcagagactgggaagggtggtggaagggaggtggggatggttattgggtacaaaaattacagttagaaagaatgaaaagacataatatttgatcatatcatacagtaactatggtcaataataacttgtacattttacaataactgtgaaagcatataattaggttgcttgtaagacaaaggacaaatgcttaaggtgatagatactaaattctccatgatgtgattatttcactttgcatgcctgtatcaaaacatctcatgtaccccacaaatacacctactctgtacccacaaatttttaaatgacattgaaaaaaacaaataatagccatactgattggtgtgagatcatatctccttgtggttttaatttgcatttctctgatgattagtgatgttgagcattttctcatatgtttgttggccacttgtatatcttcttttaaaaaatgtctgctaatgtcctttgcctactttttaatggggttatctatttttcttcttgttgagttacttttagattctagatattagttttttgttagatgtatagttcggaattgttttccattctataagttgtctgttcattctgttgattgttttttgtttttttgtttgtttgtttttgctgttcagaagattttaaaattaagttccatttgtctacttttgtttttgagtacttagtcataaattctttgcccaagccagtgtcgagaagagtttttcctaggttttcttttaggatttttatattttcaggtcttacatttaagtctttaatacattttgagttaatttttgtatatggtgatttatgacccagtttcattcttctgcttatgactatccaatatttacagcacaatttactgaataggatgtcctttccccagtgtatatatacatttttttactttgttaaagatgtgttggtcatagatatgtggttttatatctgggttcttaatttggttaaatcaatctatatgtatctgtttttataccagtaccatactgttttggttactgtagccttttagtataatttgaagtcaggtaatgtgatgccttcaactttattcttcttgcttagcattgctttgactatttgggctcttttttgattctctatgtattttactatctttttctaattctgtgaaaaatgatgttggtaatttataaggactgtgttcaatctgtaaattgctttgagcagtgtggttattttaacaatattgatgctcccaatccatgagcagggaaagtttttccatttgtttgtgtcatctatgatttatttcatgggtgttttgtagttctccttgtagacacctttcacttttttgtttaaaggcattcctaggtattttttttttttgtagttgttgtaaatgagattgagttcttgatttggttctcagcttgatcattattggtgtatagaaatgctaccaattttgtacattgatttcatatcctgaaactttactgaagtcatttatcaaatatagggtccttttggaggagtcttaagggttttctagatgtaaaatcctatcatcagtgaagagaaatcatttgactttctttttcccaatttggatgccttttatttctttctcttgcctgattgctctagctaggacttccagtactatgttgaattggagcagtgaaaatgggtatccttgtcttgttgtagttcttgggggaggggggtgctctcaacatgttcctgtttagtatgatgttggctcttggtttgtcatatatgacttttgttattttgagatatgttctttcaatgcctagttgttgagggtctttatcttggggagaggctggattttatcaaatgccttttctgcatctattgagatgatcatatgttttttgtttttaattctttttatgtggtgaatcacatatattgctctgcatatattgcaccacacaaaacatatattgtgttatgtggtgaatcacagatattgctctgcatatatccctgcctacctggcataaagctcacgttattgtcatgtattatctttttgttatgcttttgggtttggtttgctagcattctgttgaggatttttgcatctatgttcatcagggatattggcctgtggtttcctttttgttgtgtccttacctgcctttggtatcatggtgatactggcttcgtagaattaattagggagaatttcctcttgtttgatattttgcaacagttacaataggattggtaccagttctttgcatgtctggtagaattcggctgtgaatacgtctggtcctgagctttattttattgggagatatttattactgattcagtttcactatttgttattggtctgtccaagatttttgcttcttgtggttcaattttgggagttgatatgtatccaggaatttattcatttcctccagattttctaatttgtgtacctagagatgcccatagtagtctgataatctttcgtatttctatggtatcagttgtaacgtcacatctatcatctctgactttgcttatttgattcttctgtttttttcttggttaatctagctagtggcctattaattttgtttatcttttcaaagaaaactctctaatttttttaattttttgtcttttattatctcagtttcatttagttctgctctgatcattgttatttcttatattctgctagctttggtttcggtttgttcttggttttctagttcattgaagtacaatattagtttgctaattttagatctttctatctttttggtgtaggcagttaatgctataaatttccatcttaggactgcttttgctgtatcccagaggtggaggtatgttgtatgtctctttttatttgtttcaaaaagttttaatttcttccttgatttcattgtccaaagatcattcaggagcaggttgtttaatttccatgtatttgtatagatttaaggagtcttcttggtactcatttctagtttttttccactgtggtgcaagaagatgcttgatatgattttgatttttttaaaaatgtgttaagaaccaccttgtggcctagcacattttcaatttttgataatgatccacgtgcagatgagaataatgtacattctgtggtggtagaatagaatgttctgtaagtgtctggcctggaaggatattaatacttgattttacagacaaatagatgtgttcaaagagtttaaggagttgttcaaggtaacttcagtattaattggtagattctgattttaactttgacctgtctgcctttgagaccatttctctccattttgagattccagtgaagcttgactccacctgagatcctagagactagagcagttgcagagaagtgacaaagagatttgaagatgttgtggcatttggattcccaggattgggaatgtctagatagaaggtacagagactgtgtgcatatgagtcttcaaacatagagtaagcagtagtggtagctacacattaaatactcagaatcaaaatgcttaatgaaataattcatcaccattactcctgtagttctttaaaatagaggaaaaagagactataagggaaacaggaatataggcttatgataagaatggcaataccgtctgagcaggaggataatcattggaactgaatttcacaactatattctgttagcagcacaatgcatagcatttcctctgtgctctgcctgaaactttccaccccaactctctcccaataatcttcttttctttttcaataattattttcagtaaaggcattttataattatttattcaatgttattggtttttaatctgattttaattctgtaactatatgcagaatgtatgggtgggtgcatgcatggattgtagaaagagtaggaaaggcaagagaattgagggctaccatttcgtgattagggactgtcctcactccatgacatatgtctgcccatgcaaatttttctgtgataaccatcagatgaggtagtttgaacctacttttattaatgtagtgtaaataaattggaagttcaggtattatttaaggatttaacacttactgtatatttctccagaccttaaaactttgctgtaacttcacttgttttcatgacttttcaaaaatcacattctcttcctgcacttatgatgtctattagaaaggatgatagtcagaatgtattagatgagggtaaaatagattagtattaggttaggtcattgcagtttagtttcaaaactttgatataaatatggctaaatatgaattctttcaactaattagatgctaatatttttggaatttatattgttttccaggcaaaatgcaaaacagttttaccttattcaatcttcttaaccacataaagaaataggcagttttattatcttagttttacaaattaggaagctgaggcttggtgtggttgatgactttctcaaagtcacgtgattggttattgatgcttccaggaattacacatagaaaatctgatttcagatgctacacttttgactacagttttactgtctcctcatagtcatgcacaagttttggtcaatctatttcatcctatgtccttttccatatgtaggagtacattaattgtctactttatttttaaaacagtttcttttcgtatttattgagtccccttcaggctattgagaagcatttagtgtgcttgtatagcctttcaaatctctccattgaaacagtctttcagaacccccatttggtagcttaggagttggcagaaacataaacattcatttctaacaaaaagataaaatcagtgtgttctgatataagaactaataaagatattcaatcacatttaagtaagtgaatatcaaaagcttttctagggtagcctgttgaggaagattatttaaaatattcagcaaatttataacaaagttatataccgtaaatagatcttcatggaaagctagacaatactgtgaccagccaggcttagcaaagtgaatatttcactgcaaataaaatcgaaagtcctttccagatcatatcattcaggccagcaagggatatagagcctagcccagtgtagaggtggtagaaggaatggggcatagaggaaaagagtgaaaaaaataaattacctaccaccccatcatttcccaagaaatcctaacactttctgatctgtacttgaagtttttatttgaaaaaaagtcaattcctgtccagatgtcttgaattaacatgatcattagtatctagggatttttttgttcatgagacagcttttttaagatacttctttcctggatgttagactcaactctattcctagaaccttctgaattcttaatgtcctttgcaaattttatgtttgctacaatttttttctcgttagtctttccttatgtgtgcatttattgagataaactacaaactactgaatatttgtaattaaacatctaaatatattaattttaaagtcatttttggagacaatagattgccttccaattcatgatgaacagcgttctgtgttgtttctaggggtgtgttttgtgtgtgtgtgtgtgtgtgtgtgtgcgtgtgcgtgtttgtgtgtgtgtgacctgcaagtaccggcaattagctgttgggtattcaatgaagtcggaggagtagttaaaaaaaaaaaaaactttacatataggtaacagctgttcttttcctgttctttccatagctgagtctatgctatggccaaaagaaatagacaagtaaaacaaaagcttctcccatcgaatttacaggatacccatccttgtttttgttttctattatactgcctttcgattaattattgctcttcacctttaaacatcaaatcaaaaatttccctagccttacataattccatgtctttatttcctaagtattattttacatgtgttctaagaaagggtaaaatagcatagatctagaataaacactgaagtggctctccagtggtttttctaagccacttttgaaaaccaacttgacatggacaagagccagaagaattcagtatcactgatggcatttaaaagaagtacaagaaaagtcaggtttaaataataaaattgggaacatgtactaagggagtaacaaattttgttaagccctttaactagagacttatttagaagaaatacaattattcacagaggtataacaaaaactgtttgtccaatctaggcattcttaatgttacatctcactgttggccttttctcttgtcataaagaaaaaaatacattatttgacatttgacaacaaacattggtaacatttgtatctaataatggtaatgaaatttaactaggaacatgatagatgtttgaaatctggtaagtgttacaaaagcattcctttaataaaataatgaaaataaatgcataataaagtacctagtatgtgtgtatatatgtgtatgtgtatgtacaatctggaagcttttaataaaggaaaacattttaacaatattatattacaatattttaatttgaaggtattattttctgacagacaaacatttttgtgtacttctctagggatgcatctatatttggaaactatttggctcatatttcaggcttaattagcaaatccaatataaatctccgttgtataaattcatctatgacaaattgaaatccataagaagtcagtatttaaaattgtaattaaatatagccttacaacactttagcatattattttttttaaatactcttgagaattcatttctttccaactggagaaacaggcaggcattctttaccccaatgatcaaggcctttattcatggattcctagtttggcagaacaattgaactttttaactccagctttttatgtctggcgtttctgctacttgtaagaatcagtgtaaaagtaaaccctgaacgttgcatagttcataatctgtattttgctgatattaaggagattagctaatacagttatattcactaatatttatttcgcatttgaagtctgagaaaataggagacgtgcttactgttttaccatagcttttgtcttacagctatttagtgtgctcaaaaaagtcagtttaaccttttttagtttaattcctaattagctgagaaagaagaaatacaattttaaaaagtcatagaggagaagagatactggaaataacattaaatcaaatgtaccttatgcaaatctactccagcactctggactcttcaacgttcttagtcactgtagagagcctttccccactcctttatttccttgtactcaccgtaagtccagagggttcttgtgttagattttaatgctatcatctcacaactctctttagtggtactttacgttagcacttctgccaagcataaaatataaacccttgatcaatatggcaagaatgccatttccaattataaaacaaatagatgaacgaaacaaaatcagaacaactaagtaatggagaatatagtacgtttgatcacatagactttaaaagactcaataagagttggattcattccatggatccaatgtttttcttacacttcttaagtaaaatatattaaaattgtgaaaaagcaatttacatgtaaaaatgaaaactggcattatttacttgtaattttgtaatatatgtaattatatatactcattgaaggacagaaaagaattgactaaattcagaaaaccaacttatgatacactggccaccaaattatcattttaattattatttgaaacattcccggctgacaccttcaaaatgttcccagtcctgtcttatataactcagaaaacacagactcaacatgactgtcaaggacaactctgaattttaatgtttccatttttggcctcatggcaaaaagagttttattaaccattataagctctggaatgtcaaaggcatgataggcagtatagattgcacacacaaaatagatgcatagtcattttattctaaattgcttcacttgaaaatgtagtatgaaaatctagagagacgaagtaaaaagaagtgattttatagtgttctaaaatgttgaggcttcgaaaataagaagcctaggataaaaatgctcatgcatttgagattgtgattcagccatcctaataagttcccttccacctgccatagagtttgaatacctaagagctagactgataggtgctaagcactgttgttttgcaagtagggacagcacgtttgccagaaagtaacgggaaatgtcccaaacttgtttctccactcttgtgttatgtaacaaaatgttctaagaaacaaagtagttgcctagaagtctcaaatagctattcagagaaatcccaataataaatagtgtaacagggtaaggtcttatgggatctggagcacccaggcaacataccttggttctagagcagcctcctttgtttacccctaatttattcctgtgtttacccctgttcatcattacaaaataattgtacatcatgtttttaaaaagattggaaatactgttttgtgacagcctcacttaatagggggaaatgattttttcagagccacatttgtaagttagaaaggcagtatttgaattattctggttttatcctagggttcagttgagaccaagtggttattttctgttgaggttagtgtaattgtgattacaccaaaaatcactaattcttcctattatattgtaatctttgtgcaatcaggaaggaacaaactcatctgtgcatgttttccccaaacccccacatggtaccatttatctgacaaatgtttattgatctttatttgcttgtaatacatagtgagaaggacagagggcatctctgttctagtggactgcctattatagtaagtagagacaaaaggactaagctgatacataagaaattattgagtagtgacaatactatgattaaaaaaatgacagaaatggtgaattactagggagcaacattggatagtttgctcatgaaaagctgctctaggtaggtgacacttacattgagtcctgaatgataaagaaatgatttaaacatctggaagaaaagcaatcctggtagagggaacagcttgacacatttttggaagagagacaaagcaagtcattctgaaacactgtgagggcgagaatggtatacaattagactggtgaggtagtcaggtgctagatcatataagaatttcaggtagagaagttaaattttctttcttagtatgatagaaatctattggtttttataaatcggactgacatctgatttgtagtttgagcggaagggaaaaaacgagtaaaggagctaaaaagtagtgtataggccaggcacagtggctcacgtttgtaatctcagcactttgggaggctgaggtgggtagattacctgaggtcaggagtttgagagcagcctggccaacgtggtgaaatcccgtctcaactgaaaatacaaaaaattagctgggcgtggtggtgtgcacctgtaatctcagctactcgggaggctgaggcaggagaatcccttgaacccggtaggtggagtttgcagtgagccgagatcatgccattggcattccaccctgggtgacacagtgagaatccgtctccaaaatagaaaaaaaaaataaaaaaagtagcacataggtaggagggtaatcaagagaaggtgtcaagaatgagggagtggccaattaggttagtaatcaacatgtcaagtaagacgctataacaaatggttattgaatttaggaacatgaaagttgatggtgtcctttacaaaagatatttcaatgggttagtgggcaaagtgaatagtaggataaatatgtaggcacagtaactataggatacatttgtttttttttttttcagtgaagaggaacacataataggacagtaggaggaccggtttgttggatcaagagtttgttttatttttatggtaatggagaagttcagtagagaagaagagcctgaaaatgccagaagtgctgatagttgtaggaaaaaagtccttgaaagggagaaagggggtgggatgagaaggagaacatcctgctgtacctttcttaacatttgtcttctctagatactttccagttaaattaacaatagaacatataaattttgctgagcgtcatagcagaaaattggcttggaatggttttaggttaataaaaaatgggagtacctgagatgtagcagaaataaatttcaccatttgagagcaaatcatttcaacacacatgtaagaatatcattttaatttcctttaaaacattttatctttcaggtgcttcaagaagatctagaacaagaacaagtcagggtcaattctctcactcacatggtggtggtagttgatgaatctagtggagatcacgcaactgctgctttggaagaacaacttaaggtcagattattttgcttagtaaactaaatatgtcctttaaaagaactataacttgaaaagtattttaaaaatttagaatgcaatttatatattaaaatacttagaatacaatatgtgtacaatatacacacactcataatcagctgaagtgctgtgatttaaagaattccataattctgatacaatagtaactaactgcggatgggtaaaatctaatactttaccagaaaatttcaattaatattaaataaggctgggaagcaggggttgaagggaggttactggttaaaaaaaatttaaatgcagacatttttctaaggcatggagtatttccatttaaaataacaattgaaagcacccatttcatcattagctgacccagtgtgaatagcttttcaatataattcatccaaggtgatgcttgtgtggttaaggcatcttgaaaaacagtccgtagaactcacagatggttgtatggtgggcctatactcttctgtatttgttttctacttgctttcattttcaccttattttctgcctttatttctttggcccaaagacatctactaaatatcggtaaatgtactgattatccctaatttgcttaaactctatctgcatttgtccatgattgcatacccctttaatggctactgccttccagcctcctcttttgtcttcaatcttctttcctcttttgatgttctcattttgcctctatatagctctgtagtgtcatgtgactttaagataatctagactagtatctaaaagggcagcattaaaaggaatcaagtggagagaaagcccttgctataacttttctttgattccatcccatcagttccttcagtcccaaaagaatccatgcttgagttctatactttatttaactattggctggaattgtcgtggaatgctctgcttccatttgactttgaaacagagatgattcttaggttctttgcaagtgatataatcttgtcttacctagtttactttttaaaagcaagaagaagaggacgagaagatggtacagaaggaggagtaaggagaaatcataaagtattaaaagattgataaagtataaaaacataaaaaaatttaacacaaataccctgggtatattataattctagggtagcttcagagactgtggactttaatatgtttaatactggactgagagggattctggtagacgtaattagaagaattacaggaaagagaaacaggtatttggatcccctaaaagaaaaacaatcatcaggactcagagaaggatcttagcaggctttttattagagcagagtctggctatccttaacttattcctcaaaacctattagtgttgagtgcccatctcacgccttctcttccttcgccctggcatccctcatcaccacaattccttcatccattgcactaaaattctgttgaaatgccatccagaggctcaaaaaggatagccagctgtctttggtaaagaggtacagatgggggaaagtaggaagggaagtccccatttagtccaataaggaagagagatgcatacttaacaccctgagttagaactctaaaaatacttccaataggatatatctgcatgtattgatttattctgtaaattctattatgatgatattttaggatttctctaactttaaaatacctttagagtcttctttggaaaaggtttgaagaaaaccaaagacaggtcagaatatatgcttagagtttctgaaagatgacatagcttatgaagtgtaatattctgaaaagtgtgctctccgataattagattctttctctcaaaggttcagcttgtccctcagcaatgttactgcagattagagtcttgtccttaactttagaggcttccaggatgtcagtgcgtagagagtctgtttcataggcagtgatgccagttaacttatttgattgagaaatatttttataaactaaattttataactaaaattggtcatttatatagtcttcagttttagaggtcattaccacatctctttctaagcattccacatcccatttgaatttttttcaacaagtactcgttatgttcttactatgtcccagggattgtgttgggtaaccaggtaagacagttaaaaaaaagaatttgtcactatctaccctggttgcgatgggtaatttgagagcctactgccttccttggaaccctggaacaatggtgactatatctcagtctccctctttgtagtagaatgctaattccttgtcatccatggtcactatgataggcaggtaggcatgggaactgcgctcttggtacatgcaatccagtataaaaatagacattaataaagtatttttaaaaatgagcaaatgttaaagaatggatgcaacttatttataaaggcaaaaaataagcttttgtgacaggaaattactctgacttagactgaactttgaacgcaacagatgattcctgaggaaagttttctttaagctaagatctaaatcatacattggaggaaaatggataaagtgtgcatgtaagtgtcatgggatccttgggtgtcactttgccagccagaaacctctgtggccggcagcacctctgtctgggttttgcttgtgcccgctgggctccttgcacccactcagcctggcaggctgtgcttggcttgcactactggcccggatccccatgcctgccaagggcaagccaggcacagagcagtaagaggtatgtgagcaagcgagcatgaggcctggccactgtgcacagacaggcatgccagctgcagcggaaggcagctacaggcaccagtactggtggcagctccatgtgaggctgtggctggaccagatgtaccacaagtagcttctgctgcaggcaccaatgtctggacaggggatcgcggtggcacctgaaagctcagagacaccaggaaccacagagccccaaggagcatgttacagcatgccacaaccctggcttgaggagccccaaggtctgggctctgcaaaaggccacagctcttctctgtttctcattgcccatagcatggtgagtggggggcatgtttcagccctgtttgtgttacagctctttttgtcctgccattcagcaagtcctgagttcttgtcccatgtccaggaagaatgaggtacatggacaactggagggtgagcaaggtgcagaggagcttcattgagcgagagaacagctctcaggataccacggtgggtagctcctttccacaggcaggtcgtcccagggagtgtgcagctgtgagtagagaggagacccatggtgggtggctcctttatgcaggcaggtcatcctgaagagtcaaggagacacaaagtaggtagctccttcctgcggctggtagtcccaatgtctaagtttgtctgagtctggggtttttatgggctcggaagggaggaggtacattctaattggtccatggacatccatggataggcccagaaaaagcaccataagttctcattctgggccacaaactccacccagaactggcagcccagcccccaggcttcaggccattcttggcttgaaggaggggtttctctgtggatctgctcctttctgcccaggagccagtctgcctcctgccaccatcaacatgccatccatgtagcctaggcagtttataccaaggggtacctgcaggcccacaccgaaccatcctcagtccccactcagcctctctcccatgctcatcagtgcccaaagtccagacgggcgcaaggcagcagggggctggcatgccagcactgtcccgagcacacacataaccagtcaggttgcgacaacacctggtcttggccgcaactttgcttctcccaggagccagtgcggggagcgaggagatgccagggagtgggagcaggcacttcttagtatgtggaggcaggggggcttcccaggcccccaagagcgcaggaatgcccaggtccggagctgtggctgggtggctgcagctgcacctggaagcatggggctcccaccctgccaactcagtagggagcagcgctcctgcttgttcctggcccttggtggctccacacagtgcacagccctggccacgcctcccttgctgcagctggcatctttgcagtggccgctccagacaggctgctgctgccatcataagtgagattggtggaggtgggtagagtttctaggatggataaatggtaaatcaagagagcgtggtttataaaaacttgcatgaaaaaagactataaaaagaccataaagaaagccttttgttcttgggagataactgtttctaataaagaaagaaggagaaacatggttaagcccatagcttatagaagatgctctaatgaaaatgtcttccaaagaaaaagcaaaaccattaaaaccctatttttaggtatgttattctgtacaagttaaaagttgagagccaactatagatgtattgaaggtctgtgtggtcatagaaccaggagaatttctgccatataaaaggcatttgaattattttgttaaaatactttaatattgaagttactgcctaatattttggagaattaaaagtatatgaaaagaatgaggctaggtacagtggctcacacctgtaatcccagcactttggaaggctggggagagaatattgcttgagcccagaagttcaaagattagcctgggcaacatagcaagactatcatatcgtattttgattttcctaataaaaataattataaagaatggataaagacagagtgtattaaggttctctagaaggacagaacccactggatggatggatggatggatagatagatgtatatatgtgtatataaaatatacatttaggagtttatcatggagaattggctcacatgattacaaggtgaagtcccatgatacgccatctgcaagctgggagaagagagaacctagtagcctggtgcagtccaagtccaaaagcctcaagaccagagaagctgacagtgcagctctcagtgtgaggccaaaggccttagagcccctgggaaatcactggtgtaagtcccccagtccaaagactggagaacctggagtcctggagtctgatgtccgagggcaggaggagaggaagccaactgccccgcagggcacaggaagagagtgagtaaacttaccaagcaagctactttatccctgttctcctggctttgttctagtctaactggcagctgattgggtggtgcccacccacattgagggtgggccttcctctcccagtccactggtccacatgtcagccttctttggctacactctcacagacacacccggaagaaacaatacttcatcagtgatctaggcatccctcaattccatgaagttgacacataatattaaccgtcacaacaagtattctattttcaagaaggaaaacctggaaaacacaattttggatcagattattaaacatgaggccatgctcactggtatggtttctcacttatctcatgcagttaataaacatatttattgcctgaaggaataatttttgcagatgagatagttttctaagaactaagctacattcgctaaaattgagtcatgtaaaccaactttatatcagatgacattaaacaatttgtagaaatactttgtggtagtattaagacaaattattttgttagacttattaaattggctgatccaatggaatggaatgaatttgaggtattctgattttcctgaaccttttagcaaagcctctgcgtgatactgtttattggtaaggtgagtctatctttctctatgagtgttcgtgggtgagtctgtgttttaatatattcctttctagtatctgatttacgtgctgaaaattctggggaaggaagccatttgaggatttagctggggctctgtgtaaagtgtgcccctgtaggagtggttaatggaatatttctgctcccatattaacttagaaggtttatagctatgtcctgaggagttagaatatcatatacaaatgttacatcctattgttttaagtcagaaaactcatgtttatagttcgaaatgttgctgctttttaaaaatgcaagtagtataaatcagttgaattagtttgagatacaaagggtctgacttcccatctatagatataaatgtaaatatatataaatgtaagtgtgtaaaaatacatgtaattttgtctatataaaaatatatgtataaatgtgtatatagttaaatttatatacatctctttatgtttctatatatatacatacgtacatctttgtgcatatgtatatatatgtatatacatacatatacataaacataagcacatatgagatagagtgcacatgcttactttgaaacaagcttgatattaaggatgatacagattcttagttaatgcaatcacagactgtgatatagtgtctagattacatgaactaataattatactctatgctgatttgaatacactgtattttacgcccacgattggtactctatcttagcaggattttctcagatggcagcatcctgtgaagaatatttgtagagtgggcgattatttaattaaaaaataactaatcatagggaaatggcacatgaacactattgtgatggtgaaaaaggaaggcactttctctatggtttttcaaaatgtcataatatcagaagcagacagaagttggtaactctggatgtcttctgcccagatctttcctgagtccattttcttctaattatcttctgaacacatccttgaagtccaaacaacacttcaaactcaacaagatgaaacttacctcactgtacattgccttcctttaaacctgctttccttactgaatttcttatttttgtcattgcactggcacttatcatgacacctgtaccagaaacctagagtcatccccaaattcatccctgtcctttcccttatgagccctttgcatgcaatgtcaaaatatttctcaaccttatcttgtatttattatttcatctttgttcttgtcaacatttctcaaggtataggccatatcataagcccccaaagtccttgccttcagtcttaccgctcttccatccaatctccacattgaagtcagtgtgggttcccaagagcctgtttaatcgttctcctttgcttaaaatcctgagtcactttccagattctgatactttggcctacaaggtatttgattacctgactcctaccagtctctatagacttgtctcatgttatctgctttatgtccctcaacctgcatttgattcatacaagctgtttctgataccctgtatgttacgacctctttgcacataccaccgggtttaaacagacgactctgcttcataagatctgctttgataatttcatctatgtatagaaaactcatttcaagttttcctccatgaaattggccactctacctagtgatgactactccctctttgtgccatgtctgtaccctaattgtgtctgtttgggcaccgatcatatacttttgcagttaatattaatgtgctttactcttttattagaatctaaattacatgagatgtgtcttacacattcttgcctgcattgtcagatacaagtaatcagtaattcttgtaagataactgaatgaacctatgaacagacggttggatataattccaagaaagatttttttgacttaaaagggagagctttttgttgtaaggtaattaagaggagaaactctagaaatagacccttcctgctctgttccttatctacagtatacctttgggcaagtcacttaaccatccttggctttagtttccccatctttaatatgaagattgtattagaacctacattatcagatatctgtaaagggtaaaagggtagttgagaagctaaagcatttaaaaatcactgaaatatagtaagcaataataatattagttactattattatcatcatcagcccagagcattcttacaatgcgataagagctgtggaaagtggtgagctgttcttcattaataatatttaacacaaactggaatctcatgttcaagtatgttttaaaagaggtgacatactgagtgggaagttagacttgatagcctccaatgtcccttccaatacaggtggagtgcaagaaaataaaaggaaatactgcccaatcttatctagtagaagcataattctccctcattctgtagagaacttcagctttaaaaagcatgattctcaaaattactttcataagaaaaaacaatctgaatataatggcaaaatataaagaagtcaaatactacattctgccaattattttgaccaacagtgataatttttaaaggtgacaaatctggataagtagacaataagaatgacagacatttaatggtaacatctctttggacattgctgttagtgtcgttaatagttttaacttgtgtaacatgagtatcacacaggttacaaagggaatgtgctatatctcagttacaaagagaatgttaaaataacaaagccacttggaaagaaaatgctatactgtgaaaggtagttgttcagaaagacgataaagtcagatttttctctcatcacctaaatgtcagttaggtaactgaaatttttatagtacatatcttcgggatagtatgagaaagaaaattttatagaatgttagaccctatcaaattaagaaatagaagttatttatgaagaggaatatggttgaaacattttgatgtttcgctctagttcctaattttatatttggtgaattaaatgcatttaaaaaaaactttaaatgtgatggaaataatccacaaagctaagcatcaacatttgttgcccaagaagcaataattataattattagattattatttttcaggagttttacatgctttgtatgtaatgccaaccctatatcacaaatgagaaagccaatgcataatgaagttaaatccaagttcatatagcttgcaggtggcaaggctgacactggtattcagatgtgtgacaactcaacctgagatttctcccaatctctcaaattcatagtagaaatttgctatgtggccttgtgaaaattatgtgatttttttcagttttggtttactaatcagcaacgggggaatacagaaacctatgtaacacagtaatgtattcgtacctgtaaatttaactcattcatgcaaatactatctatctgtataaaatgcaatatctattcatatatatatgaatagatatagcatttgcatgaatgagttaaatttacaagtacaaatatatataatataaacatatatatttatttattttagcacctgtcccactcaattgcattagtacataaatatttttctcttctagaacaacactgttctagaagagaatggtttatatatgtatatagtttatataagcagtatatatatattaacacctgtcacactcgattgcattagtatataaaatttttttcttttctagaacgacactgttcagtaaggaagttgctatacacctttggctattttgagcacttgaattgtgactggtatgcttgaggaactggattttttattttatttacttaaatataaaatggcacatgattcagttattagaaaacttttgagtatgttttgatcagctttgatatgtgcattgttttttcaactgcacattgtatcaagtataaataaatgttgaatattctaatgaaatttgaacatccaaagccaatgtgctgtaagtatacagttaacgctagatttcaatttatgttaatacacggtctgttgtaatacatttggccaatagggtgttaggtagatttgaaagaacacaatgtctggattactcaatctgttttctattctgactttataatttatgagttgaacaataaattctctcatgataaaaattatcaaatgaaactcaaagataacagtgatcataatacccaccatacaaaattacaggggaaatataagcaagtatgctggaacaataatattctttttttttttttttttttttttttttttttgagacggagtcctgctctgtcacccaggctggagtgcagtggcgcgatctcggctcactgtaagctctgcctcccgggttcatgccattctcctacctcagactcccgagtagctgggactgcaggcgcctgccaccacgcctggctaattttttgtattttctgtagagatgggtttcactgtgttagccaggttggtcttgatctcctgacctcgtgatccgccagcctcggcctcccaaagtgctgggattacaggcgtgagccaccacgcccggccacccggccaataatattctttatgaatgcaagtgttaatacatttacaaaaaatttttaagtttattgatacataatatttgtacatacttatagagtacatgtgatattttgttacactgttgtatataattatatagtcttcctactctgctatcgaacattagaacttattccttctatctaagcgtatgtacccattaaacaacctctcttcattccatccacacactcttcccagtctccagtatctatcattctaatctctagctctatgagatccaattttttagctcccacatgtgaatgagaacatgtggtatttgtctttctgtgcctgcttatttaacataatgacctccagttccatttatgttgttgcaaatagctatatttcattcctttttatggccaaataacattgcattatgtatatataacctgttatctgtttatctgttgatggttctgaaaaaaaaatgcaaactttatggtactttttaaattgaagtatcaagcaaaggacataagttataattatagcttaaagacttattacagaagtaacatactatgattccacatccagaaaaagatagtatgttaccagcaaccaggaaacctccatcaagccctatggtatcataaactcttcccatctcctcaaaggtaacatgtatcttgagttataatgctgcaggttagtcttgctatatttttaacttgatgtaaatgaaacttttatatatgcagttttttaactggcttttttcactggatactatatttgtgagattcactatgttgcatatagcattactttattaattttcatcgctggatagaattactttgtatgaatataccacattttacatattctgttcagaaaattggggttgtttccagttcggaagcattacaaataattcatctatcaacataaattgtacgtatatttttgtgtatatatgtaaacttttgtattaggtatttacctaagaatagcatttcttaatcattgggtatatgcatatttagctttcaagatattaacaaagggttttccaaagttgtataaattcatattctcaccagtagtaaatgaaagtacaaactgcttcatatcttcttgaatacttgtttgttaaactttttaatttgagcctttctggtgactttataatgtcatctctcatttttcatttgtatatactgatgaccagtgaggcggaatactatttcagttgttattggccatttaaatgaactcttctctgaaatgcctgtttttctactggattttctatatttctcttactgatttattttagtttaaaatatatatattctgggtattctttgctgtttatattacatttttctttttgaatgggtaccttgccttttcactccgtaatgatatatctcttcataaacagaagtttaaatttaacatagttcacttcaatattttctgttatgtttagtgtacttttgtcctcagtttaaaaataaaactctctactttaaaattctgaagctatggtcctgggttgctatataggaactgtttgttttacctttcgtattacaatccacctattattacaggtatgaggaagggatgaatgtccattttttcccatatagatccaactgaaacaacaagttggcactgtagaatattgaggaaaagatggtcttattgcaaagattttcaataagaccatcctttcctcaatattctgtggtgtcatctttgacgaaaatattagaaataaaatgcctatacgtgcatggatcagtttatggactctaatcagttttatttctctacttgcctgtcctcatgctaattccacattgttttaattactatagcattatgacaagttttaatatatggtaatatttttttgagatggagtttcgctgtttctacccaggctggagtgcagtggcaagatctcagctcaatgcaacatccgcctccctggttcaagcaattctcctgcctcaacctcctgaatagctgggtttgcaggtgcccaccatcatgcctggctaattttttttgtattttgagtagagacagggtttcaccatgttggtcaggttggtcttgaactcctgacctcaggtgatctgccagcctcggcctgccgaagtgttgggattgcaggcgtgagctaccaggcccagcctgtatctggtaatattgtaaaagaaaaaatgcaccagacaaacaggcaagaaagactttattcaagactactgaattatggatcaagactattgccataggagagagagatggaaatcatttctactgaaagaaagacaggagagaatttaagcactgaggagagctagtagaaaaatactggaagatattagggggttaggatggtgattaggcaatctgtgattgttaattggcacttaatgaagttaggctcctactgtcccacagagactgggagataggcgtgctatcattaacaattacatttcaaagagatggctcctaggtccttgagaaagatattcccggattgtagaagatttacatctcaaagaggcagagaatatgtttttggttgcaagtttccctaaagtaagcgctctaagaaaagagaggtcaggagcctatagtcaaataaaagcctgtctagagtttagtcacattaagtttgttttggtcagttggtcagtaaaagccattttattttcttcctttttaaagattatcttgactgcttttggccatttcgatctccatatgaattttaagaacagcttgtgaaccctgcccccaaaaagaatctgctgtggttttaattggatttcatctattctctggatcaacttgtacagaatcaacatttttattatgtaaagtctttcaatcctttcatttagttaggtctttattttctctcaataatgttttatagtttttaaagtaaaggctcttaaactttctctgagatttatttcttgggtttttatatttttgctgttatgaatatatttttgaaatttcattttctatttgtgctgatataaagaaatacagttgattttttttcttggtcttgtatccaggtaccatgctacatttacttaataatttgaatacattatctgtagtattattcagatgtacatatataggttgtttttgagtaatgacagttttctttctccctttccaattatttttcatgtcattaattttccctgacatattgtactgtataaatactctagtacaatgggagtattgtggatatttatttctcattttaagtctcagagggaagaactttaataaataatcattaagtatgatctttcctgtaggtttgttgtagataccttctgttcttaatattctaagaggttttatcactaccggatgccaaattttatcatatatttttccagaatcatttgagatggtcgtatttttcttctttattctgctatatgtcaaatcacatgacttagttttctaatgctaaaaaagcctttcttcctgtaataaactaaacctggataagacgtataatcttttttgtgtattgctagattttctttgattcatagtttttcctttacgtccatgaaagtgattggcctgttattttcctttcttgtaatatgcttgctaggtttaagtacctgattatgcaggcttggtaactggcttcataactggaatttgcaaatgggaaattttaaaattaaatttttatgtatttaatacacataaaaatgtccatttttaattggaatttcaacattacatttttccagattttccgttttggagtcagctcgaatcatttgtgtctttctaggaattggtctattgcatctaaaattacagatgtatttagataaagttctatttagtccctatggtatttaatagtagtttattagctaccattgtttgaaattgaaaaaaatgtgacatgaactaagaatttctaacctctctagagaaagcaaatgatctgatgatccttagtctgtttttctacatagtaaccagagcaggagtcaagttgccctgttttctctagcacaggctcttcatttagccacagtccccattactacctattctgttacacctacattatcttatgcattttattaggtatgtacgttagaatttgtgatttcttgtggatgaaaagttgtgatgtcaagagttggcatgagacatagagggatatttatcttctatgcacttgctttcaaataagataccttttggagcccgtgctcagtggctcacgcctgcaatcccagcactttgcgaggccgaggcgggcagatcacttgaggtcaggagtttgagatgagaccagccaacatggtgaaaccccatctctactaaaatacaaaaaagagccaggtgtggtgtctcacacctgtaatcccagctacttgggaaactgaggcacaagaatcccttgaacttgggtggtggaggttgcagtgagccgagatcgcgccactgctctccagcctaggggacagagaaagactctgtctcaaagaaaaagaaaaaaaggatacctattggaatatggccctgttgtttaaaattgtaaaggtaaaaattttcaattcttgtataaaacataagctttatcaagtatagaaaaaaatgcaaaaaaaattatcattaattgtccttctaaaatgtttcactgtgttctatattaaaattctatcatgctccagatttatcacatctggaataaaggctgatttttttatcgactgagctctaaatccttactatcacaagcatctcaataattcatcacagatttaagagcactttcacatttattgatctatctgaccctagcagttacctgtctaggagagtctgtactattatctctatttcactggtgagaaaactaaagcacagcaagattgagtttgttcacagatattacaaagttgggcaacagtagaactgaagtgggaatgcaggaagtttatactttatgtaatgattagcagattgaaagatccaaaaaagatggttctaagacaaaagttgggtggggaaagccacctattgataacgacagtagtagtattcagttttgggatatttgtgcaagacattaacctcaaaggtaaggagcccacctcaaggagctcagagtctgcgaggtataaaacgataaggaagaggaaacctcaagctaccaaggaatgcctgggaatgtgatgaatgctggaaggaacactgttacgctggaatgctccttagaactcctgctctttattttctggtatcccaattgaacagactggtgggagctggagagtacagagtttattaagctgccaaaaaaaaaaaaaaaagacattaaataatatcctgcaaagaataacagcagtgacaacaacaaaaggcttttccagatttattcattagcactttgtatactcacacaaataaataatataggaaactgactgaaatagcgtagagaagaacatgcttcttcgtgttaaaatctcactacactttcagcacaattgcaaaggcagaatttaatgaacaaatcagtcatacttaccttttaaaaataagtcctgcaaaggccacatgttcttaatctggaagtgcaagtatttgctgacgttttatgattaaacaaatacagagttacagtgtcaaatgtttttgaatcaaattataacattaagcttcacatccttgtgaagcagattagattaaatgttaaatctagtcaaacttctgctaaaacaaaatatgaaaagactccaaagggattcggcatctggatatctcactgtaggttgtgtagcacaaattagaaggcatatcttttataatgaatgccctactgaatgaataccattatgaacgagcatgaacttgtagccaaatggatctgaggtcaaatcccagacactcagtactgtggcttctgtgacctcagacaagttacttaacctatctgtcagtttcctcatctgtaacctgcccctttggaagtgacagctaaaaattccttgagttcagacaggagattattacaggatcatttaaatagaagtaagaattatacttttgaaaaaacttccagtagttgtttcataactcatcaaaataggtttatccgccctgtaccatatgttatacagtgaagatataaggtacaccattttatagtatggtgcttcagttcagtttgtagaaatgtgtaaaactgagaaccaagccatacccttggctaaacactattcagtaggactctgccacatttctgcctcataatggatttttgtttttttcaatggtttttgatgtgatttccatttcaacatcagtaagagtaagttgcttatacgttttaactgcatagttgttgataaagtaagagaaaaatcaagaaataagggattttcagagggctcattacacataaaattcatttagcagagaagtgtattatagggtcttaacctgcaataaaataagatgggttgttttctgcctccctctttcataaagccccgttgctgatgcattgtgtggtccatggcacataattgtttccgccttagtggatatacgcctgggaacactctatctcttaacgccaatactgatgggcacagtttaggtttcatattctatccctggctccagtaaattcaagggtcaccatacttaagatttacctcccaggcttgtcagattttcctcagttacctttatccaaatgttcttttagtagccatttttcacttttgaattgaaatagcaactcaaccaaacaaaggaattcagatgagaaatgtccttggcacgtacaacaatatgacatgtgaattaaatgggaggaaaaaatcctccccgttgtggatctgagcatggacgataatggagttgtgatttagtccatgaaaatgttagacgaagtgagctgacctttagcttcacttactgctgagacaaaatgagaatataaataaaaattaacttcttttaccattttgtgagactttgtaattcattggttttacatttatgtgtagaatgtttagctctataaaaatatgcattattgctaaaagctcaagggattcctatacgtaaatagaaactcagagaaacagagttgaagttacatattttttttttctctagagaagaggtttctaatcctaatacagtggttctttaaaaaatatatgtattagccccattttatccaatttcttacacttgtctaacaattttgttatagccattcaggcaatgataggaaccagcatctttgagtgattccagagctgagggatatagtcttccaattgctttgcttcattctttgtaattcaaattaaggccaatattgctaagcaataaataggtaaatccataaatttaaagcacttcgtgtattatctatttatacttgtgcatatggcatcacaaaaatgtatgggcagatgtttacagcgtatgagcaagtaatttctaattcacttttccgcttacactgagatcagtggaaagcactatgcctgccttgctacagaagtgacttagattcaattcattgagtattttctaagagtaagataggtttaagcaatagaatatgttactaaaggatatgtgttcatgctgtcttgtgttggaaacctttaaagaatatacttgaagactaaacatttattcgtaaagatttaatgggtgcctttctacagtgaatacagtaaaatagatgacccttggcagttcttagatttgatgtaagaaccatgatcaagcaaattgtaaacaacgaccaactcttaaataacttgtttcaaattaataatactttcccatacatactcttgtttaacatttgcaattctttaacgggttggtattattattcgacagacatttagccaagtatttcttgaaaaagaatccatctatcttaattgtcttttgtattactcctttgtgagggctatcattaaaaaataacatggactggtggcttaaacaatacaaacactttctcaccattctgggggccagaagttcaagaccaaggtactggcaaggattggtctcttgtgaggcctctctccttggattgcagatgaatgccttgttcctgtatcctcacgtggtctctcctctgtgttgcacatatccctggtgttttgctgtgtccaaatttcctcttctcataaggatacccatcatattggactagagtaaccctaatagactcattgtaacttaatggtctatttataggctctatctccaaatatgggcacattccgatgtagtaggtggggcatagggcttcaacatggatttcatgggacacaattgagcctgtaacatcttctcttaatatttggcatatccagatatttggtacatatttgttatataataaattcatgatcaatgaatgaatgcattgatggctgtcattaactgtaacctagatattagctgaatcataaacttgctccattatttggatataaagaacactttaagtggcattttttaaatagttatgttaaataggttgcctatgtacctaaaagagtgtttaattacagcaatccctccctccctccctccctccctccctcatccatggttttgctctccttggcttcaattactggcagtcaaccacagtcagaaaatattaaatgaaaaattccagaaataaacaattcataaattttaaattgcatgctgttttgagtagcataatgaaatcttgtgctatcccacctctgtctcacccaggactgaatcacccctttgtccagcgtcttcatgctgtcaatgttacccgcccattactcagtacctgtctaggttcttagaaacactgtcatggtatcgcagtgcttgtgttcaagtcaccctagttttacttagtcatggccccaaagtgcaagagtagttatggtggcagttcaaatatgccaaagaaaaactgtgaagggttttctttatgtgaaaaggttcccaacttaataaggcaagaaaaaaatcgcatgctggggttgctcaaaatctgtggtaagagcaagtctatccgtgaaattgcgaagaaagaaaaataaattcataaatactatatatagggttttgtactacctgcagttttaggcatccacctgaggattttgaagcatatcccctatggataaaggagaactactctattagttttttgtgactcatacagtgaacaaaactgcaatattaaatgcatcccattagtacatctcagaatttcaataaatttgaaaatgttatacaacctggaataggggatctttatttggatttgtattcccactaaaattaataaattatacatttccacctatggggttacaagcttaaaatgctgcttcagtggatactatatgtcttgtagcactagagagaagatgctatatatacttgaaagtcttttttgtttatgaatatgatgctatagcttgagtttgtcccttcttcccttgactgtcttcttcactggagttgatgggctacaataaatttcccacattttgactttgtagatctgcatcatcacgtcaggtagatggtgtagtttatacttaagagataagattttctccatttgaagcttttttctcccacaactaatctattaaccattttgttacgtgccattttacctgacatgcactgacagggtcactaggaagttagctaaaaaaatgcaagtatgttttagaaaaaacctatatatactgcttcgtaataattagatggttgaagtgactaaattcattgatttaagctcgcacatttcctgtgggtatctcgcatcactgtttgagcgctatggcttttattgtaaacataattcaaaataagttgagtagaaagtgaaactacaaaaaattaacagttacattatgctgaaagcaataacattgatatttatgaagaaaaactgaaaactcacttatgattgagctgcatataagtacatgattatgttaatactgtaggaaaatgttgactgccttctgtttacccatgcgtgtatttttttttaagtggtgatagattaaacaatttaagaaacgtgactctcctagtcacttagaaataggtggattagggccaggtgcagtggctcatgcctgtaatcccatcactttgggaggctgaggcaggtggatcacctgaggtcaggagttcgagagcagcctggccaagatggcgaaaccccgtgtctactaaaaatacaaaaattagccagacatggtggtggatgcctgtaatctcagctactggggaggctgaggcaggagaattccctgaatccaggaggtggaggttgcagtgagctgagatagtgccattgcactccagcctgggtgacaggagcaaaactctgtctacaaaaaaaaaaaaaataggtggattattttcatgatgctaatttcatttgcattgtttaaatcatgtgttaatatcctctaggtgggttaatacacatatgtagtataaagtaacatagaaattatgagaccttagacactgagtagatttttcaaaaatatgagttataaacatttttctaactctaattctatataaaataaagcacgtcaatattttatgatttctagctttaaaggtccaatatatatatgagaaaataagtttcttatttatatgaaaaagttacaaaaagttgaaaattcaggctataaagtgcatcataatgaggttgagctaactgccattttgaaatgcttcctttgcatagaaagcatcacaatatttgttttccttccaaaaatcattgatagttggtttatgttacatattaaaatagtgtgtgttcttagacattagtgacatgttaatgatatagtagtttttactcagagattgttagttttctcactagagtagtttagaaacagaaaattttaatacttttgtaataattgagaaaattgaaaaatctacatagtaatagaatttaagttactaagaattttcttctacaatccaaatggtaggcaattctcattatgcaagattgtttcaattaagagtcttttgaggcattctatttagtagttagacttttattctttagggtgtattttcaaacctaaggaaaatacaccttttacttgttctcactgcaaaatcctctctatatgtatgtctttgttatcttacatttgctatggagccattttatatagtggtataataaccacttcatattgcttgtctctttgcttttctatgaaaggtacaagacttggtgagataaagacaaatgacagtcacaccacttatttaaatgtaagcagatcagaaagagtgtcccttccaacttctagcgtacataggagactgagatactttggcaaattattcatgccatttttaataaaacgtagttaccaattgtttgctgatgctgtgcttgattgtctcttctccaggtattgggagatcgatgggcaaacatctgtagatggacagaagaccgctgggttcttttacaagacatccttctcaaatggcaacgtcttactgaagaacaggtgtgtcatgtgtgagaaactagctgtaaaagacacggggggatattaaattggaaaagtaaagatttatgtttatttattccttggaattctttaatgtcttgcagtgcctttttagtgcatggctttcagaaaaagaagatgcagtgaacaagattcacacaactggctttaaagatcaaaatgaaatgttatcaagtcttcaaaaactggccgtatgtactttctagctttcaatggtcttataaaaacccagtactgtatattatcactattatttagtctcttctatgctattgaatattaaatgtttatttttgcttggatcatagattattcaaagatgttatattgctacttttctgaattaaagtgggaaaaaactataggtggattttcaactttgtttttcaaagttgtactcttgataaaacatagcataccagaataagacttcaattaaaattaataaagtaatactaagaaatgtctgtgagcctttcataaagttctaagcagcatagttctaaaaaaatagactgacgttgattctcagaataatatgtgagagttacaagcgacggttatcctgacattgatggagtttaaccttagtttattataaaggggtacctgagactgggactgggtaacttatgaaataaagaggtttaactggctcatggttctgcaggctgtacaagaagcatgacaccagcatctgctcctggtaagtgcctcaggaagcttacaatcatggcagaaggagaaggggagccagtgtatatcacattgcaagagtggaaacaaaagagataagaggaaggtcccagactcttttaaacaaccagatttcatgtgaactaactgaatgggaactgactcatcatgaaagggattgtgctaagccattcatgagacatccgccctcatgagccaatcacctcccaccaggccctacctccaatgctgggaatcacatttcaacatgagatttggagaacagagatccaaacaatatcacctagtttttcaagcaaaaaaaaattaaagcctatcaaatgacattgattataaatacctcgagtgttttgagaatgagatttctttggcaataaatggatttcagaaaagacttcattgaagcatttggtttcagcaggaatttccaagatttaaaaaaaaaaaaaaaaactctaaagtttctcttactctgtgaattttatcatttctagtaaaagaggccggtctgatactatgagtttaatttttcacgtgacatattctactttatgatttcttaaaatttttgatagatttgattaaatgttcatttgatatgaacttttataaaacaaaatggttgtaagtagtgttccataatttcacctttattattgcattgtacttcataataatgcaataatttctaaacttaagtaaatttttccactcattttaaatacgtaccattttaccagctatttatttgtttcatacattttttttgctccataaatgctaaccctcattggtcttttaatttaaaatagattcacttatgtattacttgttattacaagctagcttattattgataagaaattattgctcaaagaatatggactttattaagtgatgtgactgccgaaaatagagttcagaaaagtaacctgtatatgtttgaaaacacgagtgcaaaaatatcagctgtatttgtagttttggcctgcagctgatggggagccattgagagtttgcaaaagaatcatatttgcatttttgtaattctttttggtaggaagatgtttgatggtacgaggactaatcagaagacctgaactaagtagcattgggcattaagataagaagagaaacattagaatgttaagatgtgatgaatgaaacttgtgataagaggcagaagtttgaaatggttcctagacatttcatttgggtgactgggttcctaggagggttattagccctaacaggagaatagaagaggaattgctggaatgacaaaaatgataattatttcagatttggatatattccgtgtaaaatgtctttgagacatccaagttaaaaatcctttccattaatcagttggtttacacaactagaatctcagaaaatggttcatgactagttattgattcagaagcaatcaaaatgcttctgagggattgtgtagagtgacacattaagtgaaacgaatagatttcagggaggaatgtctacaatcaaggagtaggcagaggataagatgttgaccaaaagattgagcagataccacaaggggaaagtggtatcacaaaagtgaggagaataaagatttcaaaaaagtaggaagtggtacacactgtcacatgccacagagaggagaggataaattcatgagggattctatcatatctagaggaatggatgcatggattacatctccttaaagcagaatattccttacaaacattgttcttctcaggcaaaatgtgaatcctttcagtaaataagtgagtgaccactgattatcaaaatgcagtcatgccctctgattaggagcgaagatatattgctagttaaatacagaatcatgtgcttcagacggtcaatcataatggtgatggtcagtcatattctgtgtgctgaaaaagtcacaagcctgcccagattcaaggaaaagggaattagatttcatttcctcatggagaaacaccaaggtcaagttatagcaaagcatctgagatgaggatattttacagccatctttggaaagtaccacatgccagaatagtacagttattttacatgatgataaattccaaatcttaatatctagtcaaagttcctgcatatattgttgactagatttaccaatcaagaaagttgttcttaggaagccacaaactgacaaaatccaaatatgttaaagctagatgagattttgcatctcatctagtgtttcttcaatctcattacacatgtaaagttcattaggaccatctactcagtttgtttccaagagaaaatcgagatcaagaaaaaacacaggatctgtatcctacaacattagtatcagacttaaaatgaacactaagacatccagactcaggtccaggcctttcaatctatttcagtagtcctcatatcagttgattccttggaaaaaataactgcaactgagaactgtcatttctaacaataatgtgcctctatgttaacatttttgtgagcagaaatcttggctagcctcagggccataaaaatgctcttttaagaaagtcaataattttccaataggattaaaatttgtgttatgtcaccttgcttgtgaacaaagagaaaatatgttttctataggtcttgtcatttgatagtttaagccaattaacaaaacctgacagctggtctagaatttgaggtaaaattcctttgctgactcaggcagtgaataagaatttaatgttcattaaaatatgtcacaatctgagacccaaaacaggtaccatctgtcaccagttttcactacatgtctaggtatagatacactgtgctaaactctcttctctttacaataagtgtaatttgtttcaaaatagtatcactgataacccatgggattgtgtcctgcttgccattgaggtgggaggtggggattatgacatttaatttgctctagatctttgggattcatatccaaatcatgtagatctattattttttataatcaaaactgatttaagttttaaactgatttggcatcagggataaaaatgaagggaaagaagaaacagtagcttttatgaggtgaattataagacttgtagaatcacgtaaattatcgtgggaagatccaagtcaagaagaaacctgttcctgagtaaatgtatttctgctgtggggactgttggcgtttgctggggaaggacagctctggggaagcagggtgatccaagagattatggtatataagggctacagaagtacttaggaattgaagatattctcaaatggctgtgggatcaaaggacatggatgaagtgctcatggtaactgagcaagttcctgtttgacttgctacctttacctcaactcctgggatggccctcaaataattaattcagacaggatcaatgcttctcaaaatgtgttcccccgaccggcagcatcagtatcaaggaaatttgttaggaatgcacattgttaggccatcttcagacctactgatttagaaactctggaagtggagcctagtcatctgcattctaacaagcctttcaggtaattctgatgttctttcaagatgagaacctctgtaatagatcaacctcccaaagtacaactggtgattagaatgaattggagcacatcttacatgtagataagtaactacacataatataggtggaaaactcaattttgccaatataggagaaattgtcttggcattattctcttatgcgtattcctgatgagagtgaggtgaaggtttcctgggccttttgtaaggatacattatcttttcacttcaaatcatcttgaacagcttatctgtctcttctccatatccactactgacccagtctgatttattgactgtaccttcctccctaccttggaggtaggtctacattcctggcttctataaaaataaagtctgtttattcttttactatcccagctggcctttgccttgtacacattctctagatcttccttttgccacctgaattttctagagctctatgggtctctggcactcatagacctatggttaattattgatatgtagaaatacatattttatgcaataattagtaacaaatcatagttatttaatatgcacatgtaagacctaagcttaaaagaatcagcatcaatggatagacaggacaaggtaattctaatgaattctatgatctaatgtatctggccccatcatggattttctttcttttcctccctcagttaataatcctgggggagttctggaactgggagatgactactgaaagacagaaaaagagagagaaactgagaccaaacaactaatctgccatcatcatttttgatactcatatctaaaatttactaggtataagtctgggttcagtgtttttgtcatacagacatataaaaattcatttattcaataatcacacaatgtaattataacattgattttactttaccttgagtgcacttttttcctaattggatttttttttttttcttgagatggagtcttgctctgttgcccaggctggagtgcagtggtgtgatctcggctcagggcaacctctgcctccctggttccagcgattccttgcctcagcttcctgagtcgctgggaccacaggcatgcaccaacattcccagctaattattgtatttttagtacagacgaggtttcactatgttggccaggctgatctggaactcctgacctcgtgatccgcccgcctcagcctcccaaagtgctgagattataggcgtgagccaccacctctaattttatttttaatggtgactttcactttcatttttgtaatgcttaccaaatgtttcttcatgtggcttaataataaaacaggaggcttattttcatttgtttaggtaccatgaggttactcataggtttttattgcaatcctcttctttaaacataattctcacactcctcttctgacatgtttccaaatcattacatattttgtttaaataatgggtagaccattcagccttacacatatggctatttaaaatagtttctaacattctgagtaagtaagtcaaagaggattgtacttagattttttttttatttttagatttgtgtctttgtgtatattgtgcctctttccatagtaaagaaaaaaaatgacactataactggaggaatatacattgaaattcaaatatggctctcagcttgggacaggtagcatcaacctttgttctagtactaatgcaaatattcacttaaatttaatggaaaactaacaagtgaattaaacaaaatgaatatgcaaaacctatctattgggctgggtatggtggctcatgcctgtaatcccagcactttgggaggccaaggcgggtggatcacttgaggtcaggagattgagaccagccaggccaacatgttgagactcctgtctcttctaaaaatttaaaaattagctgggcttagtggcatgtgcctataataccagctactcgtgaggctgacaggagaattgcttgaacctgggagacagaggctgcagtgagcagagatcatgccactgcactccagcctgggcgacagagttagactccaactcaaaacaaaaaagaaaaaccacctacctattgctaaacccccacaccgtgagttttattttgatttgaattcagtgtataatatcttaatttgtattttggtctattgcattctttcaaacttagaaaaatactgaacttattgttaaggaaaaattagagatgaaacttaaatcttgctttgtttccccttaaaaatggcatgaagactgaactataacatactccaggtgaagcagattctgagtaaaagacaaactaattgaaggagccactagagcattctgcagttcagagctatcaatgcaggtgccatgccaaaatgggctacttagattgtccttttcaggaaggtgtattgactgctctaggtttggggcactttgcttcatgggcaattggtgcatttgtgtcatgacaatttgctctgtggtatgttagttcttaaataaacttacatttgtttcggaaagacaggtatcgcgatttagtttacattcattgtatttgctgccaaatatggggttgttaagtggctgtaagataattttctcctttatttctcttccttcttctcctttgtttacagattaagtcagggagtaatgttcagtacccaggaattgaatttgtctgtgtatcaggcaaagttactgagtcaagtaaaagaaaaactgccctgatttactgatttcacataaaccacttattcctttcaaatcaaccaaagggagtttgtaaccctccacagctcacaggaactttggaaatataaatggtataaaaattgcttcataagacacataagtatttataaactctgaaaagagatgctgaagcatttatgtcatgcccagcgacttagttcttttacttaatgggctctacaattagttttaaaaaataattactcaaataaccagatgttaattgattaatggatgctacaaaaattttatggtcagtaaatcacataatgagattttatctccaaataatgaaccgaatgttaaaactgtggaaacaataatattgtaattttatccaaataatcacagcatttcagaatggcaagtttccttagccattctcattttctcagctcactagcttttcttcagtactcctggtacctgattgtcagttttcgtttgaattccgtcaggaattaaggggaaatccaagatccgtgccttctaatttccacatgttgatctctgttttgccttttgaagcaatattaccttttcacttggattttcttcaaatatttcaaggtagctcttaattacctctagtaggtctttattctacgtttgagtttcttttctcttcttttctcttcaaacttcttgggataattagatagattataactttctacctctatttttctgaacttttgatcctttgcgggcacgattgaaatattttcttatctatgcaaatgagcaaatacacgcaaaagcagattgaactatagtggtgtatggaatgcaacccaggcttattctgtgatctttcttgttttaacaggttttaaaagcggatctagaaaagaaaaagcaatccatgggcaaactgtattcactcaaacaagatcttctttcaacactgaagaataagtcagtgacccagaagacggaagcatggctggataactttgcccggtgttgggataatttagtccaaaaacttgaaaagagtacagcacaggttagtgataccaattatcatgctacagactatctcagagattttttaaacctgcattaagagagtgacattataaccctacaaaagaagcaaccagattagtttttgccctgtgtttagttaaataaaaacatgattcttttgcctgtcttgttgttggagaatggtggtgaggtagagtgctaattaactgaacttgttactgccctagagtgaatttcttccagcccaatagtaacggggaactgagtgacttagagcaggcgaacaaaatgctgggaactgtataatcacagtctaaccccaaatcagagattgctagaaccacgaggaacattagccaactccgttttactcttgagaaaaatgaaacttagggaagaaaagtaaatttttcaagagaagttagtggtaggagaactagggttcaggtcttttgatttcttggaaagttttttattagtgtagttaattatctgactattgtaccttttctgccatagactgctgatttcataaaattatgaatgtggcttagttatactaacacatacgggctgtagattatgaaaacatctcagctacatttggggtatgtggttttattataataatttttaaagatttagtcactaaaatggggtatcgttaaaagttgaacctctttttgtcttatgtagttggatggtagaataatgagtagtcattcaagatataaacattatatataatagtatttaacatattctgccacatagcctggcattataaggaataactttactcaaaattcatagctcaatgcacaggcatacacttccatattcaatagattttaggcaaatatttcctctatattgagacaagtacatggaatttgttttcttgagacctgacatctgataagtagcacttaggaaatgccttttggagacatgaagtttgtagtattgcctccaggaatacaatttaagacagcgtaataaaccagcctatatgattttcaatcacagttcaatgttacttttaatccaattttacgttaaaaaattataatttgaagaaatatgaatataaattgtaataatttcccacacaatcattacataataaaaactccatttgttttccattaaacatactttagcaattaattgacctaatagtagttttagtactatattatgattcctcctgttttatgtgatctgcccatggcttctttgcaatacattggtatttatgtaataaatacatgagacattagtcaatttgatactttttaacccaacactgagagtattcccatatgtacccattgcttccacagattattgctgccataaaatggtcagttgccgtgttaagaaagattgccattatttgataaagaaagttattttgacgtgcatcccttttaagggacatgtttagggagctgtaacagttaactgtaggtcatcttctagttcatttgcattgcatggagtggttctcaaacttgagtctgcatagtagccacctgaggagctaattaaaatgcatattcctaaacattttgctcagaaaatctcatccataagctgtgataaggacctaaaaatctacatctttactaagcctttgatacaatctgcagaccatagaggggatcaacatacactgggatctacttgaggtgggagggtgggaggaagtagatgagcagtaaataagactattggatactgggcttaatacctgggtgatgaaataattggtaagcaaacccctgtgacacacatttacctatgtaacaaaccttcatatgtactcctgagcctaaaataaatgtttaaagaaaatagacagtgatatgtgtgtgaatcccaacattctggttttccacaatgctccctgaaatgtgaaaagggagagcttcttgggaatacactatataaatatgctcattcccttggaatgggactactttttgatgaagtttgtacatgtcatcgaaatattactgatttgattattccaattggtagaaaagcatttgaagccttatttttaattccctagaaattatgagaccaccacctaggcaattgacgtgatgtcttccaacttgtataattctataataaaagaatactggttttgatttgcatggttctttatgaaataaagtccaacatgcattacagcatgtatctcttcacttgctcatagggatacaatgaagataaaatggaggcatagacaagaaagcatttgaggggaaaaaggttgagtttgatatgtaagtcatgtagttcagtgtgtctggagggctttttgtggttctctatctgcttttttttttttttttttttttgagatggagtctcactgtgtcacccaggctggagtgcagtggcacaatctcagctcactgcaagctctgcctcctgggttcacaccgttctcctgcctcagcctcccaagtagcagctgggactacaggtgcctaccatgacaccccactaattttttgtaattttagtagagatggggtttcaccatgttggccagggtggtctcgatctcctgaccttgtgatcctcccacttcggcctcccaaagtgctgagattacagacataagtcaccgcgcccggcccactatctccttttaattttattttcaaacagttacacgctcctattgtgggctagaaataaataaaaggacttaacatcatgtaagttgttttccagaacactaagcttgagtttttcttaagcttatgtttcagttttctctcattgcctttccaaaaattatgctgtcatgggattgatccaaatctttgctggctgtttttgagctcacaggaaggtagaaatggagctactcaggaaaagagaaattaaaaggaggtaaacagagacaacagcgaaatagtatcatataagagcaactgattttcttttatccatgttaaattgaccttgattaaaattacataaggagaattccaagaatatgagctgtaaggttgtgactttgaagaacaaagctcacttgtatgtacattttctataatgattgtgggagaaaaatgagtttcattaatgactactcacatgatatactcaattgtttcaaaaattcttttaaataattagtataaagaatgagcaaagttctcataatggttaaaacctattgtgaggcagggtgtggaaatcgtgattgagatgacaaggcacccagttgtactcatataaagaacactgcttgcgcgtatgattgctgttcaggtcagagctttgaggcatttttgaccttttgaagcagttgcatggcaagagatcaaaacgtgaaaaaataatcagctaggaggactgctctcttgcatttcaaactcagatttgacttgaataatacctggacacaagctgagggtatttaagttgattagaaggtagcctaagaagatagaaaatactttttttctaaatgttggagagataataactcttgctatctggaggcttacaatgagaaaagagggcaaatataccctggattgacttctttaaaaactcaaatgatcatgattccctgtaattttttataaacatacttgtaatttgtgcagttttttctaattgccttggccctgatcgatatatattttatcttgatcataattatgaaatacgatagtgacgaattccatcaacatttgcttgtctggaaaagattttattcttccttcacttatgaagcttactttgtctggatatgaaattctgccttggaaattcttttctttcacggtgttgaatattagcccccaatctctactggcttatagggtttctgctgagagatctgctgttaccctgatgggcttccctttgtaggtaacctggcctttctctctggctgtccttaacattttttctttcatttaaacctggagaattgtatgattacgtatgttggggttggtctgctcagtatcttgcattccctgaatttgaatgttgggctggcttctgctcagtgagtatcttgtatttcctgaatttgaatgtttggctggctttctagattggagaagttctcctggatgatatcctgaagtgtgatttccaacttggttccgttctccccgtctctttcaggttccccaaacagtctttgcttcagaatttacataatcccacatttgtcagacgttttgtacattcatttttattcttttctttttctctaatcttttctgcctgtcttatttcagcaagatagtcttcaagctctgagattctttcctctgcttggtctattcaggtattgacaatgtgatttcattgtggagttgtcgtattgcgtttctcagctctatcaggtcattcatgttcctctgtaaactggttattctggttatccgctcctgttacgttttatcgtggttgttagcttgtttgcattgggttagaacattctcctctagctcagggaagtttgttattatccacctttgaagcctacttctctcaattcatccatattagcctcagcacaccatctcacgccagacagaatggtgatttttaaaaagtcaagatacaacagacgctggcatggtttcagagaaatgggaatgcttttacactgttggtgggaatgtaaattagtttatccattgtggaagacagtgtggtggttcctcaaagaactagaaccagaaatacccagcaaggccgttactggatatatacccaaaggaatataaatcatcctattataaagatacatgcatttgtatgttaattgcagcactattcacaatagcaaagacatagaatcaacccaaatgcccatcaatgatagactggataaagaaaatgtgatacatatacaccatggaatagtatgcagccataaaaaggaatgagagtatgtcctttgcagagacatggatgtagctggaagctgttattctcagcaaactaatgcgggaacagaaaaccaaacactgcatgttctcacttataagtaggagctgaacaatgggaacacatgggcacagggaagagaacaacacacactggggcctgttgctgggagaggaggagagcatcaggaaaaatagctaacggatgctgggctcaatatctacctaatgggtctgtaggtgcaccataccaccgtggcacacatttacctccataacaaacctacacatccaatacgtgtaccctggaacttaaaaaaataaatgtgatagtaagaaatttattataattaatattttaaaatataatgtatgtgatttgaagcattactttcctcatttgactgaaatcacatgtgctgttgaaagggtatattagtcatatgctttacaatttggtatgctaattgtaattatcatattacgccataaattgtaattactgtatttaatatgtaatttatattaagtagtatataccaggtgctttggtgtaagcatatatatatatattttttttttcaagcgagtctaaaggttttgtagttttgtggatttttagtagaataaattgtcttctttctcaggaataaggaaagttgtatgacttattaaggttcaaatatctcattcccattttgtgaatattttgctatattgctaacaacaatttttgcaacattctcaactgtgagcacctctttaagataaaatacatatgctcagaatttgcctcttcttgtacatggcagttcatgtttatgctgtatatgtttgtgcctacattcaaggatgcccaaaaagagaaaatgattattatataattatgtgtaccttctatatcatctatatcctgatgagagatttattatgtgtgctgccgaagcaagcacctgatgggagatttaaaactcctatcaaatagtaatataaaacatagctgtaaatgataagccagtgctttttattatacccaaaatgcaaatagaaatatgccaatgtaccaagatgaaaatttctttacatgttcttcttttctgagttaattctcattctttaaagatcctctattttaacccttcataaaatattttatgttcacgttctggctgtacccattctcagagcatcattttgtagacctctttgtacaagggggatatagttgcaaatggtttgcctctcttcttttttggccagtaagtttaattaaaaatactctaaggctttttatttaaaagaccttttcattgcttcctgaaagctctccacgactagtaagcctgatgccaattaaaaaagaaaataattttttaaaatctggaattaaaataaaaataccttacttattttgtgtttccttcttacttaaggtcatagaattaactcccttaaatttgagaacatgttttgggtaattcctcaggttaaagttttattagaaaaatttgaagttgaccgagtgtggtggctcacacttgtaatcccagtactttgggaggacaaggcaggcaaatcatctgaggtcaggagtttgaaaccagcctggtcaacatggtgaaaccccatctttactaaaaatacaaaaaaagtagccaggcatggtggcaggcgcttgtaattgcagctacttgggaggctgaggcaggagaattgcttgaacccgggaggtggaggttgcagtgagccgagatcatgccactgcactccagccgggatgacagagcgagacttcgtctcaaaaaaaaaaaaaaaaaaaaaaaaaaaaaagaaaatttgaagttacatctcaaataactttggaaattaactgtatcattttgctatctccaactataataggtatttgagaatgggccttgtatatcagtgcaataggttttaccttgtaaatgcattgtctgtaacaatataaaatgtaagcactaaaaaatttaatacattcagtctgagttaactcttggaatctctcattctttatttataaatttaaaggaaaggtaagctaggcagatttctatagtggccatcgagttctaaatgtctttgatatgtttctctttgcttttatgtgaaactctggagtacttagtgaagaagattcctacttttgccactggaaaggcagctaaaaaataatgataataacatcctatccctattcaaaggagacttaattatgaaattattacactgtattcactgagtatgtcattaaaataccatacagacaaaatgctcagcatctgtatgatacgcctattatctcctgacaaaaaaatgaaataacacataaagacaaatacaagtctttttcctaagcctatacttgataatatccatccctaattatagaatgtgtttcattacttcagtgttagatggtatgtagaggaaggccagatggatcagaaaaattaaatctcattgctttgcaatttttgcaggtgcagttaattcacacagttgctcaaattccgtatttaatatgaatccagaagacaacatacatctcttctttctgatacaatttgtactaaagacaatttaaaatgaggaacaaaatacattaaattggacagacagttttacagaataaaccttcttaattatcatataatatttatttcgaagaaacaaatgacttatgatgccttctaagtatttgacaataattttgctcatgatttcaatgtcagtacttattcaagaaattttattaccttacagtaataaattaattattaatataaattaaattattattaaattattgtaataataaattaattacagtaattaatagtaaattttagttaccaggctactgtcctgaactttggcactcattgtatgctacattcagctatgggaagtcctctatacttcataagataaagcattttacatccttgtgattagtaactcagcttcctttgtgaccatctgatcttttgcccaaggattctcccaaagttcaacatataaatattttcttttgcttagagatgcaaatctttaccagatttttgtgccttgtgctaccatgcctgtggagttggtttttaagcatggctatcaattattatctaaagctgttgctatgattatgcagtatgttttaaactgcagaagtgcaattcctccatgcccattaaaacttattgatcactccaaagggttacatatacatagacagacaacgcaatgaaaagccttgatccacagttgtcaacctgattgtgtgtgtgtagtgtattttgactaattttgcacagatttcaatatagcatgtcaagagccaaacatatttaacattgagtaattcttcctatataatagttatgatgtgccattgtttacaatttcagtattctgaatttatatatgtgtgtgtatgcatacaaatacacaccccttaaaaggaaaccaccattcaaaaaagtgtacaagtgtaggagcaagtgagcatagctgataagagttggatgaatgaacattcagacttggatttatatctatgctttgctactaaaaagttttatctgcctcaacaaggtcactttcatctataaaataggaataatattagtacttactcttagggccattgtgaggtcataatagctaccatttattaaagctttacaacatagcaagggagtttttctagatcttttgaataagataatcaattcaaaacacttattgtaatgcctggatcatgcagaaagcttcataactggtacctgttattgcaagtattagtatttgcaaaataaagattttatgctaaattagtaactaatactttatagcttgaatctttctagtaagtatctaaatattcaaatactagaatatctcaaaaggcaagaagttgaaatctcttatcccagcataacaaaaaagttacaaaggcaataatatgtaaataattaaatggaaagttaaaagtttcaattaagaatatcagtcaaaaataaaaggaaaatttattagcctgttcttacactgctataaagacatacctgaaactgagtgatttatgaagaaaagaagtttgactcgttcgtgtttgtggcattatagtattccttggtgtaaatgtaccacattttctttatcttgtctatcattgatgagcattaaggttgattccatgtctttgctattgtgtatagtgttgcaatgatacacatgcatgtatctttataatagaatgatttatatttgggtatatacccagtaatgggattgctggcttaaatggtttttctgcctctaagtctttgagaaatctccgcattgtcttccacaagggttgaactaatttacactcccaccaagagtgtaaaagtgttcccttttctccacaacctcaccagcatctattgttctttgactttttaatagtaaccattctgactggcgtgagatgttatctcattgtggttttgatgtgcatttctctcatgatcaatgatgttgagttttctttcatatcgttttaggtcacatgtatgtcttcttttgagaagtgtttgtttatgtgctttgcccactttttaatgaggttatttgtttttttcttgtaaatttgtttaagttccttgtagactctggaccattgtcagatggatagatggcaaaacttttctcccattctgtaggctgtttatttactctgacggtagtttattttgctgtgcagaagttctttagtttaattagatcccctttgtcagtttttgcttttgttgcagttgcttttgccattttcctcatgaaacctttgcccatgcctatgtcctgaatcttattacctaggttttcttctaaggtttttattgtttggggttttgcatttaagtctttaatccatcttgagttaatttttgtatagattgtaaggaagaagtccactttcaattttctgcataggactatcccagcactatgtattaaataggcagtcctttccccattgcttgttttttcaggtttgtcgaagatcagatggttgtaggtgcgtggtcttatttctgagttctctattctgtttcattggtctatgtgtctgttcttgtaccagtaccctgcttttctggtgactgtaaccttgtagtatagtttgaagtcttagcttttgggctgagacaatgggggttttctggatataggttcatgtcatctgaatacaaaaataatttgacttcctctcttcctatgtgaataccctttatttctttctcttccctgattgccctggtcagaacttccaatactatgttgaaaaggagtggtgagagatggcatccttatcttgggccagttttcagggggaatgcttctagcttttgcccatttggatgtgggtttataatttatggctcttattattttgaggtatgttccttcgatacctagtttattgagaatttttaacatgaagggatgttgaattttattaaataccttttggttgtctattgagatagtcatgtggtttttgtctttagttctgtttatgtgatgaatcacatgtattgatttgcatgtgttaaactaaccttgcatgctagggatgaagcaaacttgattgtggtggataagctttttgatatgctactggatttggtttgctggtattgagaattgttgcatcagtgttcatcaatgatattagcctgaagtttgcttttctttctttctctctttctttctctctctctctctctctttctttctctctccctctctctctctttctttctttctttctttctttctttctttctttctttctttctttctttctttctttcttctttccttctctctctctctctctctctctctctctctctctctctccctccccctccctccctccctccctccctcccaggttttggcatcagggtgatgctgacctcataatataagtttgggagaaatcccttcttttcaatttttttggaatagtttcagtggaaatgataccagctcttctttgtaccgctagtagaattcagctatgattccatctggacctgggcttttgttggttggtgggatatttattattgcctcaatttcagaacgcattattgatctattcagcaattcatttcctttatggttcagtcttagaggggagaaatgtgttcaataatttatccatttcctctaggttttctagtttatgtgcatagaggtgtttatagtattccctgatggttgtttgtatttctgtagaattattggtgatattcctcttcaaatttttcattgtgtttatttgattcttctctcttttcttccttattagtctaactagaagtctaccttttttatttttatttttttccaaaaaccagctcctggattcatttagttttttggagggtttttcatgtctttatctccttcagttcagctctgatcttggttatttcttgtttgtttgctcttggtttgctagtttttttatttgagatgttaggctgttaagatctttctagctatttgatgtgagcatttagtgctataaatttccctcttaacactgctttagctgcgtcccagagattctgataaattgtctctttgttctcattagtttcaaagaactgcagaggtggcagctggtcttcctcccagaagctctgtcccagggagagatcagagctctatccattgaatcctgggtggaatggctgaagccccctcagggaggtcccacccagtgaggaggatggatcagggtcccacttaaagaagcagactggccacgatctggcaagggttgccacacactttcaaacaaacaaatctcatgagaactcttatcaggagagcagcaagggggaggtccacacccatgattcagtcccctcccaccaggcccttcctccaacactgaagacagaattcaacatgaggatttgggtggggacagagagccaaaccatatcataaaataacagcataaacaaaatgaatttaaaattaaagaatagctgaatagttcgtaattgcaactacagtcatatgctgcataacaacatttcagtcaacaatgaaccacatatatgacagtggtctcataatattattatactatattattttttacttttatttttgcttcagaggtacatgtggtggtttgtcatatagataaattgcatgtcacaggggtttgttgtacagattatttcatcacccaggtaataagcatagtacccaataagtagtttttttaatcctcaccctcctcttaccctccagcctcacatagaccaccgtgtctgttgtccccttctttgagtccgtgtgttctcaatgtttatctcccacttagaagtgagaaaatgtgatattttgtgttattgtgttagtttgcttaggataatggcctccagctccatccatgtttgctgcaaagaacacaatctcttttttcatggctgcatagaattccacagtgtatatgtaccacattttccttatccagtctaccactgatgggcatttaggctgattccatgtgtttgctattgtgaataatgcttcaataaaacatacatgtgcatgtgtctttagggttgagggatttatattcttcttggtatacccaataattgttattgctgggtcgaatggtaattctggttttcgttgtttgggaaatcaccaaactgctttccacggtggctgaactaatttacactaatatcagcagtgcaataaacgttcccttttctgtgcaaccttgccagcatctgtgattttttgacttcttaataatagccattctcactggtgtcaaatggtatcttattgtggttttgatctgcacttctctaatgattattgatgttcagcattttttcatatgaatgttttctgtatgtatgtctttttctggaaagggttcatgtcctttgcccactttttaatggtgatgtttggtttttgcttgtaaatttaagttccttgtagattccagatattagacccttgtcagatggaaagtttgcaaaatttttctcccattctgcaggttgtctgtttactctgttgatagtttcttttgttgtgtagaagttctttagtttaattaggtcccagttttcaatttttgtttttgtttcaattgtttttggtgtctttgttatgaagtctttgcagtttcaatgtccagagtggcattacctgggttatcttcttaggtttttatagttgttggttttagatttaagtctttaatccacctcgggttaatttttgtatatggtgtaaggaaggggtccaatgaataggcagtccttttcccattgcttgtttttgttgatttcattgaagaacagatggttgtaggtgtgcagccttatttctcgactctctattcttttccattggtttatgtgtctgttttttgtaccatgctgttttggttactatatccttgtagtatagtttgcagtcaggcaatgggatggttccagcttttttctttttgcttaggattaccttggctattctggctcttttagtggctccaactgaatttttaaatagtctttttcttattcagtgaagaatgttattggtagttttttgggaatagcattgaattaaaaagtgctttaggcattatggccattctgtcaatattgattcttccatgagcatagaatatttttccattttttgtgtgttatctctgagttacttgagcaatattttgtaattctcagtttagcagtgtttcacctccttgcttagctgtattcctaggtatcttatttctttttgacaattatgaatgggactgtgttcttcatttggccttagcttaaatgttgttggtgtgtaggaacactagtgatatttatacattgattttggatgctgaaactttgctgaggttgtgtatcagatcaatgagcttttgggcagagactatggccaaagtatagaacctcatcgtctgcaaacagggataatttgacttcctctcttcctatttggattgcctttatttctctttcctgattgctttggctaggatttctagtactatgttcaatgagatttgtaagagagggcccccttgtcttatgccagttttcaagcacaatgcttctggcttttgcacattcagtataatgttggctgtggactttttaaagatggttctaattactttgaaatatgttccttcagtgcctagtttgtcgaggatttttaacatgaaagggtgttgaattttataggatgccttttctatatctactgaaatgatcatgtggtttttgattttttgttctgtttatgtggtgaatcacatttattgacttgtgtatgttgaatcaacctcgcaaccctgggatagaagctccttgatcatggtggattagctttttgatgtgctgctggattgggtttgctggtattctgttgactatttttgcatctatgttcattagggacattggcctgaagttttcttttttggttgttgtgtgtctgccaggttttggtatcaggacaatgcttccctcatagaatgagttaggaaggagccgctcctcaatttttgggagtggtttcataggaatgataccagcttttccttctatatctgttagtattcaggtgtgaatctgtctggtcctgggctttttctggttggtgggctttttgttcctaatttaatttcggaactcattattggtctgttcaatgattccatttcttcctggttcaaacttggaaagttgtaagtttctagcaatttatccattgcttctaggttttctagcttgtgtgcataggggtgttcattatgaatagtctctaagggttttctctatttctgtggggtcaatggtaacatcccctttgtcattttttattgtgtttatttgagtcttctctctttttttctttattattctaggtagtggtctatctttattattaattatttcaaagaaacagctcctagattcattgaccttttctgtgcttttttgcatctcattttccttcagttcagctccgattttggttatttcctgtcttctagctttggggttagtttgctattgtttctcgttccttgtgatgttcgttttgtaattagagatccttctaactttttgatatgggtgtttcgtgccataagcttgcctcttaacgctgctttgtgtgtgtcccagagattctggtatgttacatctttttaaattttcattagtttcaaataatttcttgatttctgccttaattttattgtttacccagaggtcattcaggagcagtttgtttgatttccattttaatgtatggttttgagcaatttgcttaacattgatttctatttttattgcactgtggtccaagagtgttgttggtataattttgtgggttttaaaaaaattttctaaagattgttttatgcccaactctctatatcatatttttattgtacctttcgatatgtttggatacacaaatacttaccattgtgcctacactattcagtatagtcacatgctgtacaggtttgtagctaggagcaataagctgtaccacataggttggccgtatagtagtctgtaccatctaggtttgtgtaagtacactccacggcgttcgtacaaggacaaaattgtctaaggatgaatttctcagaatgtgtcccagttgttaagttatacatgacttgtagtgattcctaataaactggagacagtggtagaaaaaaagtattttattttattgtatgtccttttgtattctttaaatttgctttgatgtacttatgtttctttttttaaatgtgcattttttaaacaagtggaagagaagatggaaagaaagaacttcatttcttgagcatagtttgtttttcccaggcctatcaaaataacacaatcttactgcaagaagaggcacaccctggaataatatcaggatgctggcaaatgctcttccaatttttctcagaatgagaaaatgtaaattttaaagtttaaatctttttaacatatgtaatcttatgagtaagaaggttgagtatagaaaaattcttcaaatttccctgagcgtttagaaaagatagtggttactgctgatatttaccattatagagcacttattttattcagatattatatcatttaattctcaaaaccaggactggctacataatttgtgggcccagtgcaaactgaaaacaagggcttcctgttcaagacctaagaatttcaagacagtggaagcagagcttgaaaacaagcatggaagcctcctgagcaggggccctgggcaactgcataaattaccagcccatgaagctgtccttgcttgtaacacacctgtgaagaaatgtgttactcttactttaaagatgaagaaaataatgcatagatttgagataagaaccaaccagccccaaatgtcacagtgtataaactatggatctggtgtttaataattgtggagactggctccaatgcctctacttataaccactctaagaggaatcagctcccaaatgtaaagacaagtatttctaaactatttcccatttttactagggaaattaacttgcagttaaaatgaatagtattttaaaaagaaatgtattttcttttcatgatatcattttagagtcttaaatagactcataatcaaaatgaagaaaggtgactgggtaaaagtatagttagctagatacaaagattgttgaatataggtcaaactatattctattctagttttgactctgccatattaaacattttagtgaaggcactacgttattcttatcatgcttgaagttttcctcattctaatgcattgagtgacaggagtatgattccatagatcttaatatataaatagaaatgatagatttaaaacaaacagtttggcaaaactttcaaaatttttctttgcttacaaatgcaacattttgcagataatatcttatagaagaactttggaaactaaaggaatacagaaatatacactgtgcaacagaaattttctctactttctctgtcaaaaatcaaccaatgtttatgtctagcattgtttactcaatagtgtaaagcaaacgttttccaatgacattaaaatatttgaaatataatactccatccacattcatataccataatgtacttaaaccatcatctatgacatgaggttgtttccaaaagttactgttagaaagaccctataaacaaggataaatattatatctagccttcagcatcaaattaaatctaaatgttaaaatgctagctgagagaaatctgttttcataacatttaaagagaaaattacttgattactgtatgtttggtgtatgtaattattttgcatactggtatttttcacgtggcattcatcttcacaattatttgtgtgattatcatcgtccctattttgccgtaaggttcctaaatatggagtttctattttactcatttctgaatgtcctatagtgaatatatattcaataaacattagaattttatagaaaccttgtggttcagctgctgaataacttacacagttttagaattctttgattgactatggtgtccaaagccaagaaacattggttttggatgacgaatcaagttatatctacttctagcaaataactggcattatagagtttgaaaatgatatttatcagggtcatgattattagatttcaaatcttagaatatcaggtagaaatgatattcaatttactctgctttcattcagaactcaaaacaagttttaacaagaggaagtcttaatcaggcaggattcctctggttgttaagaacatctttcccaatggggaaagtttgcttgcatgctaagaaaggagctttctgtttcagggagtagtgagctctgtaataatcaggaggtcatgttaaatggccttcgtagtccctctcctgtctatatttcctaatgattctaacacataattaagtgtcaataatagttatagtcaataactataagccataaggaaatttagtacatgactgattgttttttattctgattgtatgaagtaggttttgagagtgattattaatttgttatatgtaatgagttctaccctatatttacagggtgaatgcacagttttcttatttctccatcccgaaggaaatgaagtagtatttttcaattacagtgtagtagtgattattatatagaacaattacagactcatgtcttactactcttttattaaaaatgattcatttttctttcttaaaaggttgagtatatttttaaatgccgcttcacagtatatcatgttgtcatttccctttaccctccatgggcacatgtatccaattttataagtagataccacgaaaatattaatattacagaaattaatttaagagtcaaatttttagtagcacaaatgttctatgagattggatataactgcatgaattagcttggtattttcagaatctctgcattctggtctgtatgtttaaaattaggtattttcttaatctgcaaaatattatcttctagcctccactgtatgcaaagaaagtgtgctcatggttaaaaaaatattcaaataaaaaaataaattatcttgggatcctactaaaaactgcattttctttgcaaagcaagttttctcatggttaaaaaatattcaaattacaaagtaaatgctcttggaatcctactaaaaactacattttctttttgactagaaataaaactaattttatcacgtaatggtcattttgtgttgggtgcaatgtttgagtttatattttaagctttttttagagctatgttgctttctgctttcatcttgacataacttgtcaacagacttataattaaagttgtttgaggttcagtgattcattctaaataatgaatctatggagatcctagagaagataaaacctgtgcttggcaaatgtagaaactgtaattcttagtatccttttagcctaccaaaatggaaatccttcagtccctcacataggtaaagatatgtctttaacaaaaggtagcctttttaagctatgtatgtcaaagcaatttttacttaagacatcatggaaaagattttattccttcactgttcattgccaatttggaagctgaaataagaagatcctgaggcttttcccatttcctcacatgaaaggaatcagtcctcgtgtatgaggcagggagattactacaaacccttcccttacctcttggcaaattcaggaaaattgctaaaatgaatcttgacccagccagatccctgctcctttgcttgtaaccagaggcagtttcaatgcaggcctcttgtgacttccttggaaacagaccttgcatataagttggattgccagaaggataatgattaccatcccaagaggtaacgttacaatcgtcatgagaggagctctgtgagacggagaatatgataaggaatgattgtctcaccattatatgacttgtctatctcgtaatgcccatgtattgaggtgatggcctctcatgtcttggctcacaaaatgtattattccaaagatggatgaactgttgcccccggcccgctgccaaaagtatgaacaggaggtaattgagattctaaaccaagaagtgtctccagtgatgaatatgggaactcaaatatttgaacataatcactaatttaaatcaaacaagagtagtgtgttttttagcatttgaataacattcaacataaagatatatatggactaatacatactttatgttaaccttttattgtaattttaaaagctgtttcacttatttgattaaagagtcgttcattaccaagttgaaataattttatttaaaaatgtataacataaaataatcaatgtgtatgataaccaaaaatgcattctacaaactattaataagcatttaaaatgttctaggcaatggaattggtactgatgtacgttagtaacattcatattaatgtaaacattttaaacagcatgtagaattaactatcagaatgaattatactctacatttttctcctctgcccccaccccttatttcctacagtttgaccaatatattgaaggggcgctaaattgactttcgatgttgagattactttcccttgctatttcagtgaaccaaacttaagtcagataaaacaattttatttggcttcaatatggtgctattttgatctgaaggtcaatctaccaacaagcaagaacagtttctcattattttcctttgccactccaagcagtctttactgaagtctttctagcaatgtctgacctctgtttcaatacttctcacagatttcacaggctgtcaccaccactcagccatcactaacacagacaactgtaatggaaacagtaactacggtgaccacaagggaacagatcctggtaaagcatgctcaagaggaacttccaccaccacctccccaaaagaagaggcagattactgtggattctgaaattaggaaaaggtgagagcatcttaagcttttatctgcaaatgaagtggagaaaactcatttacagcagttttgttggtggtgttttcacttcagcaatatttccagaatcctcgggtacctgtaatgtcagttaatgtagtgagaaaaattatgaagtacattttaaaactttcacaagaaatcactatcgcaacagaaagtaaatgcttaatggaaatggtgttttctggggtgaaagaagaaactatagaaactataggtgataaactactgtggtagcattttaatcctaaaagtttctttctttcttttttttttttcttccttataaagggcctgcttgttgagtccctagttttgcattaaatgtcttttttttccagtaacggaaagtgcattttcatgaagaagtacacctataatagatgggatccatcctggtagtttacgagaacatgatgtctcagtctgcgcatcctaaatcaggagtaattacagaacacatttcctgttctttgatatttataaagtcttatcttgaaggtgttagaatttttaactgatctttttgtgactattcagaattatgcattttagataagttaggtattatgtaaatcagtggatatattaaaatgatggcaataaaattttatgagtgcaaagctggcataaaaattattttaaaaggtacaatttccctttcattccagttattgtaattctaagattaagaaagaacgttaaaatctgccgtatgtttttaagcagcatatgtttagaaactcatggaacacttgacattagaatttgtgtataccagggtagagaagtttgaaaagaacacacatctaaaaataccatgtcagatgttctaagaaaaaaaataaatctagagaagttattcaaatatattatttgggatgtttagtacttctctattaactaatgacttatgacctactttgataattccaaagtaaatcactgggccttttctccctggttgtgtcagcttggctaagcaaatccactagtccaggggtcaccaaactaagacctgctaaccaaatttagcatgctgccagtttggtatggctcatcagccaagaagtgtttttacgttttcaaatggttgaaaataatcaaaagaaaaataatattttatgacatgtcaaaattacataaaattcaaatttcagtgttataaataatgttttagtggaacacagccaaactcatttatttatcacttatgattactttcgcattacaacggcagagtttgaatagttgtaacacaaactgtatagtccacaaagcctaaaatatttattacctatcctatcacagaaaaagtttggcgacccttgctccagtcaaatggctctcaaactctatgaatattagcattctttttgtggcaacaactttcaggaacttccaagcactctactcacgatggtaatagaaaatctaacaaaaattgatggagtgaaaagcataatggcacaaatccgtgaagcttttgatgaatttcttttattattcctagtaagatgtacattaacttgtttgttgtcacattaaacatgtgtttatagacaacgcttagtggacatacagatttatggatactttgcaacattccaacaaccctccaacagttctccaaacagagtaatagggacacctagttgcctaacacttttaatgtcttcaggacttgcctaatacagaaattaacagagcaagctgattcatgtcaatctctgtcttcaaaagcttattattggctcctgtttggagaatggattgtgttggaaaaaaaaaaaaagtgtgttctgacttctttttgttttcaggaaagagtggctagtggtgaaataccttctctccaaaatttgtttgtatcataagttttcggcaatttttgtatgtgcctaaatgagaagtcccattgggcacatacagaaagattcttcaaataaaagctaacataaattgaggatttattatgtgctcagtagtagattcagtgctttattggcatcgcatgtatttttcccagtaacctcccaaaataggtatggctataattactttataaaattatacacagctacagtgtacctcagacaggatttgaactgaggtagctacaaaacctgggctgtatagtaaaatgtctttttcatagatatatgactaaggtaatcctattgatttacctgaagccatcccagttacacctgttgtcccagcataattatatatagcatcaactttcactctcaagtgtgtcctgatttggacggcaaaattatctgaacacgctatatacgacacttgattgataaatttagactgaacgaagatagcaaaaaggcaaacatttaggaacaaattcattaattgataattgtctacagggtggaatcttgttaaagtattgtaatgattaaagaggcatcatgcaaatataaccataagctttatattagctagtgccccgtttttgtatcatctgaagcccactaatatttcactgaatattgaggtcttgaccatctgttgaatagtgttttatttaaatgatgtcctcttccagcttctgtgacacactaccagttgtcacccacgactctttacctgacttgttttattccttctgccttattcctatgggagtatcacacagatccatctctttgcctttctgacttcttttattttgagacagtgtcttgctctgtcacccaggctggagtgcagtggcgggatctcagcttactgcaacctccgcctcctggtttcaagcaattctctgcctcaacctcccgagtagctggaattacaggcaccctccaccacatccggctaattttttttgtattttttagtagagacagggtttcaccatcttggccaggctggtcttgagctcctgacctcgtgatccacccacttcagcctcccaaagtgctgggattacaggcatgagccaccatgcccggccttttgacttctttatctggattatctcctctcattgattcgagcctggctctaagtgactgactcccaaatcatgtagctccagatgtgacactctccctcaaattaaagctttatatctctaaagctatttccgcttgtgcatccagcaactgcctcaatgttcatcaaatgcaaacatttgttccttccaattaaccatacctacttatacattgcacacatattttagttataattcattgcctgtgtgtctagagaagtagcaaatatggaaaaaatcattgcttttggaatcagaattactgaggtttgaatgctgccctttttttttttcccaacttttagtttaggttcaaggggttaacgtgtaggtttgttacatgggtaaattgcgtgttgtggctgtttggtgtacagataattttgtctctcaggtaatcagcataatatctgataggtagttttcccatcctcacctgcctcccaccttccactctcaaataggccccagtgtctattattcccttctttgtgtccatgtgtactcagtgtttatctctcacttataggtaagaacctgtggtatttgtgaaacctgcctgttttaattactagcttatgagcgcaggcaaattacttgttatctgtgcctcagattccagtattctcactttataaaacaactgtcatgaggattaaataagcatttaatacattgcctttaaggtggtaaacattcaataaatgcagtggttcgattcttatttggtggtggagaccatagagatgatgaagatggaggaagattgtggtgggtaggaggagtagaagtgatggtgggagaggtaacgatagtagagatgatgatgatggtggtggaggtagtgatggagatggtagtcatctattatcgacagggaaaaattccataataaacattatctcaaacctaagaaatgtaaaattaccttcctgttttcctcttcaaaacagaatttaccacctgacatctctagttctgtgaatttttcttctactttcttttccttatttattataattagattgtattattgggcaagtgccatcatttccgtcatttcatgttcattcgaattgccaagtccataacctgagccatatacctcactgtggagagaactgccctcctttctaattgatttactaaaatgaatatatctaaaatgatgctttttgatgtctctccagacatgcgaattcccataaatccagatacctccaaaataaaacccaagtgcttcctatggcattcagtattattctcattctccactaattttatgtctaccttcccaataatcattattccacttcagccagtaaattacattacattcgttttgttgtatgccttcatgccactcacataaaatttctcattgcccgtcaaaacaaaggaagcctattattacacttctttatgttttacttagattccattgtagcaaataccgtggatacaataagtaaccaataaatgtttgttgagagagtgaatggtatataattcaaataattgcagtaactaaaatttgacatttcaatatcatttaaaaattctacctagctcttcctggaattgttcttaataataaacgtgaccatcctgatgatctttaataattccaattttacccattagggtatccttatttacccaaaacaattaagggatttaaaattcagctttctaccacatagtttcttaactatctaaggtacatttagtcgattcctaaataattatacagtttctacatatgttgtatttattgcataaatttttctctttacactgagatttgcaaaagtgtctgatgatcttgggtcacaagataattatttctaatagcaaattattcctgcaattcagtgatattattgtacacgtaggtaattatcagagtaaggaactcagcctagggtaaaactagatctattatctagttaattggtatttatccaggagattacttcctaatcatgtagcagttattttaagggatttttaaaaaaagctttaatttatacttttgtagcaaccaggcagaatgaatggcaaattgtttttaagtgaatgccatcttaataaagataatttcccccaagtaaagcgttcataaatgaatatctttgtcctcaaggataatgtagaggcattttgaaatgcctcagttcacctggtctgttttttccctccagggtaagcagacagaatgtaagcttgctttctcggctatttcctgcatcctaactacataggaggataaattgactgatctacatacctgaattattattatatattctacttttcagtttgtttctgttttttgtttgtttgattttctttttatggctgctgtccagatgaagttaaattgtgtcacatctctggaaagaaaatagataacagataagaccgctctgcagttttgtgagactcatgcctaaaacatttttgttttagatattgattataacttcagtttctaaactaaaatctgaaagttgtatggcaaaatataccaagttatttgaaggacctaattagataattaatgtgtccgtgaactttttttttttaatgttctatatgataaattgatcctaaaatatctgggatgttaaactcagtaatgacacttttgcctattggcacagcccatagaaacaaaacattttagatgatttgcttctttttttcctaaggagactagacttatgcatgtttacaggttaattgaggtccagaaaggttaaataacttgctttcagttgcaaaataaggactggtgctgactctcctaaatccattctagtgttatagttgcaatgtcatgttactttttatgtattaaaggaaaatgaccttggtcataaattcaaatttcgctttagacactattttttgttaaaaaaaaaaaaaaaagaaatagaaatcttgcataccatcttcacatcctcaaaaagataaccatctattaaatgttcttgagattatgttgtcttatgcatcaagaataaatcaatagcagtgttttgaagaatatagtaatgtgaattctagagaatgctatgggatcagagaatacttagaacagtaatattcaaactgcagtgcatgaaacagtatcatcacctgggaccttctttgaaatgcagatttggagggcccttcccaaacctgctgaatcagaaacactgctggtgggcccaaaaatattttacaagcactctcggtgatacttatacaccataaaatttgagaaccctcgcactggcatgacaacagtggttctcatgcttcagcatgcgtcggagtcaccagagtttctaattctaataggcgtggagtggtgcccaagaattttaatttctaacaaggtcccacgtgattctgctgctactgatttagggcccacactttggaaatcagttcactggagtgtcttgtcatttacagtctgacccctgattctctttccttatgacagcccccataaaggggctttcacgtatgtccgtgtgaagagaccaccaaacaggctttgtgtgagcaacaaggctgtctatttcacctgggtgcaggcaggctgagtctgaaaagagagtcacggaagggagataggggtggggccgttttataggatttgggtgggtagtggaaaattacagtcaaaggggatttttctcttgtgggcaggggcgggggtcacaaggtgctcagtgggggaggttttgagccaggagaaggaatttcacaaggttaatcgctcggttaaggtggggcaaaaacaaatcacaatggtggaatgtcatcagttaaggcagcaaccgggcattttcacttcttttgtgattcttcagttgcttcaggccatctggacgtaaaggtgcaggtcataggggaaaggatggcttagcttgggctcagaggcctgacaggggccatctattcctgggcaggttaagggatgctactgttgcatcttgtgacaccttactgctttatgatgaaatgatctatccatatgcttgtttcatccactagaattaaagcttccctgggccaggatccatttcttgttcgttacctgtgtgatgtcttctgtgtagtagatgctcaattcaagctgtgaatagaaatgcactatattgagaactggtcctatgagatactatatctttggatgtctggctacagtagctatgtgaaaatgtattcttccagaatgcaaggcgtaaaagaatatcaacacgaaagaagacaggatcacattcccagagctgttacatataattttgttcgttttttgagtgaagaaaatggtactcatacttattcatctaaaaggagaagcatagttgagtgcaaataaaagtcagtttttaatcagaagacctgaactatctgtattcccttacggactcctgattctttcctttaccctctcatactctacatcgagcactgaaactgctctcagcaaggtcgccagagagctccttaattgccagctccaaaggtcactcttcagttcttttccctttttgacctttgtcttgtgcttgacagaaatgattagtcccttcttgaaatttttctctcctgcagtttctgggacattgttctctcctgttttctttcagagtatatcttccctgtcttctattcctgccctttaatgtcagtctacataagactcaaattgtgattttattttcttcttatgatgctttattttttggggaaatatcatttataatctttatcatcacctatatttttgattcacaaattgatatttctacctctccctctctcctgatgttcatccctgtataattcaaatgcttataggctatgtattcctggatttctgactggaatctaaaatatagttttggagtttagatcgtataactctagagagggtcattcacatcatagtctctaagaatggtacatcctgaacttgtgcagtgagcaacctgtgcagccattcacagtggtcttgatatctgccacatcactaaatccctccaaatgtacctgttaaattctctttagtttgttatttttttctacatccttgctgccttcactctagttaaaactgaaatttttctgtatgaaatttttaactgatttctctgcctctgatctcacctctcttatccatgctttttacagcctcccgagggatatcttaaaatgcagttttaattagattattcccctgcccataaatcttgaaatgcatggcgtagaaattcttttgtgatctttagctgcctacctctccagcttcactcccttctcctctgctccttttttaaaaaaaataccagtgctactccaaataatctgcaaactttttagtaccagtccacaattgagataagaagcttgagccagaatataaatcaatgtactccttcctttgtcaagaaagttcggcaattaaaagcaaaataagatcaaatcgtttgttcagtgactcagttgatttatactctggtgaaaactcttttcttcttacagactaatagcaaacagttcactgtctgctaaagtctgaactttgttccgcactgccctatgctttagcttaaattaaccactctttgatctccaaatgctctgtgctttcttaagcttctgtttctttgtacctactgttttctctgcctaagattctctttagatacctttctttttcccattcccatgttacctgccaccgtgctactaaccaccttgtctttctggttatctaaccttgcagaggcagttctcagccatttgtgtgttttttttttttttttttttttttggagacggagtctcactctgttgccagtctggagtgcagtggcgcgatctcagcttactgcatcctctgccccgtgggttcaagcgattgtcctgcctcagcctcccaagtagctggcactacaggcaagggccaccatgcccagctaatttttgtatttttagtagagatggggtttcaccgtgttggctaggatgggcttgatctgttgacctcatgatccgactgctaaggcctcccaaagtactgggattagaggcatgagccacagtgccaggccacttctcagcctttttaacacttctattaaaacacttgccaaattgtatggtaatgactttatttttgcatgcctgtatctccagtaaacgccttgagggaagaaatcatttcttgtcatctgtacacctataatgcataaagcagaagtcagctcatagtaggtattgaataaatatttattggatgttgatgagggattttccaggttttgtgcgagtcttgtcagaaaaacaaaatcactgtgatttaaagagaggaaacgtaatataaggaattggctaagcaggtagtagaaaactgagacgcagcgcaggggatggagaggcaactcaaagcactagtaacgtaaggaagctgctaatatccctagagctggagaaacaatacagaaaaagtgatattaccagagctcagaagctggggctttctaacagagattaaactaaagttaggactgccaggcagaaaattggattgttgaagagggagctagctatccagagaaaacagaagccacagcagagatacatctgctctagaaatgccacccaaggtagttggagaagaaaaaagaccttggcttttctcttcctcccaccttccaatattctgccattgcctccaaatgaacaattaggagggcaagtggtgttgggaaatgtatatccctctaatacagaaagtacagaagaaatgtggggaatagatctgagagcagatgggcatattactgcacagatgggttctggccgtgcatcttctgctcataaactatgtgacttaagccacttaatctccccaagaatctatttcgtcacccctgaaatggaatgtatatggccttccctgtttgccctcacactgtggaaattatattacatgtgtttgtcttgaagaacgtttacatttaaaaaacaatgtctcctttccccaggagaaagttgagtttccaattattaattcagggatggtatcttcccatgaccacatttatatattattcttattctgacatcttctgagagtattcttagtaaagtcttccctggtcagaaacctgtctctttacaaatgaacacatattatgctaccacagagatataaaaatgatgccaggctgggatggcctgaattgtgtcctccctaaattcttatattgaagctctaatctccaatgtgatggaatttggaaatggagactttggaagataatttgatttagatgaggtcatgaagatagggctcttctgaggagattagggcccttataagaagacacaacaaagagcttgctggctctttctccctgccttgggaggacacagcaagaaggaggttgtcttaggctgttcttgcactgttataaagaaatacctgcaactgagtgacttacatgaaaattgatttaactggctcacggttctgcaagctgtagaggaagcatggtggcgtctgcttctggggaggtctcaggaagctttcaatcatgatggaaggcaaaggggaaacagtcacatcacatggaagaatgggacaaggagagtgagacagtgcagggggaggtggcacacatttgtaagtgagttctctcaggagaactcactatcgcaaagacagcactaagccgtgagggatccgctcccatgatccaaacacctgccaccaggccccatttccagcactggagtttacaattcagcataagatttgggaagggacgaatatccaaactataccagaggctgtctacaagccaggaagaaggctgtcaccaggaactgatcctgctggtaccttaattttggaattgtagcctatagaactgcgagaaataagtggctgttggttaagccacccagtctatggtattttgttatgtaagtgctagctgactaaaaaccggctttgttaagcaatgagtattacttctgttttgactaaagttcatagtgatgcttactaacacagtagatggattgaaacaggtcatgatgctggcagtggggcattaagtacacgtcagattgaaatggctttccacattgcactagatccttttggaacccgggttggaagttatttaaacttgaaagacccacaagcatgttgacttctcttaaactcaaggacctttcacactgagagagtttaaagtttaaattgcctcccacagggtccaagtcatcatccaatgcatggtgggtttctttgaacacttctgtagtcattatgagtccacatcatttcaagaaagaagagacagcaacattagttttcatgctaattttcctattcactcaactaatatctaatggattgctatggtatgtaaaacactccagttactttaactgtaaatctaagctttccctcaggaagcttgcacccagcataaactgtcatgaagaagtactaataaaatgttagaaaagttttaaggaagaaaagttcacttcctgcttgagaggcatggaagacttatgggaaaattagcatctgactggataattaaagagtagggaagcattgggctcaagatgaggaaagtgacaattcattgcaggggaaagcctgtatgcgaacaaaacttacatgggattaagtattcttgtttgcctccagcagaagtatgaagtaaaggaagtttagaagtaaggaatgaggttgaaaaggtaggttgagttcataataactaaaggtattcaataaaagattaaggcatgtagacttaaaccttctggtcatggggagccattgcatatttttgagagagagaaatatgatatggctactgtgaaccatatcattttgatctcacttgagagttgggagagagaggccatcttaccttggtttcatagactgggaagggggaaagaaaagttttctctaaagggccagagagtaaatattttaggttttgtgtatcataaaatttattttaaaactactcaactctgctgctatagctagaaagcagccataaacaatgtataaatgaatgagcatgactgagttccagtaaaattttatttaccaaattagatggcagaccatatttgtcccatagaacatactttggggattccggcactaatgggtaaaatgagactattttgctgttgatttttgtttatatgtttcattgtctttgttatagctgtgtttgcagtttttattcttgttattccaattgtggcttttactttatcagtcattaagaagacactaaaacaaatatgactactctcacacgtgagaaagtgagaaatggcatagggcttaaagccagttaaaaaaggatcatggaagatattaataacaatagctaatatgtatatggcttctaccaagtatttgctacatattaatgtatttcacacttaaaatagcattacgaagtaagttttattattgtcactctttgccaatgataacaatgtgtcatagaaatttcaagtgacttgctcatggtcacatagtttacaggaagcatcgcagctaggatttgaacccagacagcctagcttagggtgttgccttcggaaattcctcgccttgctatgttgtaataagttaaaggtgatttcatcaaattatttagctgaaataaaatgcttgactgggactccttaagaatttgccaaagtctatggaagctgcacttattctagattatgtctgttctacattctgaagtatcattgactctagtgtcccatggcaacacttgattatctttaaatacagagacctttttcactgaaaagatttctttaaaatttagatgtctttttcagcatcaaaaataagtggaatttccatataattgaacttttttttccaagtgcaagacttttggagctcaccatggtcttaaccacattatataataagtagtaacttttttcatctatgcttaatattttctctgatgtgagaaattgtatcatcagattagaaagttgaggattttaggaaattaagggaaattccaaggtaataataaattgggaaataaattattttatattgccattagggtacaaagtatacaactaaggatcatattttaatgaaaaatttcagaattaatatcctgatattagagacttcaatcaaattctcatataatccaagatagcgtagtcaaaaccactaaattactgtactgtgtagcaatgaacagtaattctatattgacttatccttattttttttttaagatgggtttctcgtttatttggaacaaaagaaaaatgtagtgttgtagaaatctttggattcagacagacctgttcttgagtcttgactcagtgcttcactgtgtattgaaactaaatgaagatcttcaacttttctattcatgatcaatctgcaaaaataaaagctattacagataacatacaaggtttcttgagcgattaagttttctttttgaaagcctgtgacctgattaagatgcttaaaatgatatatatgtctcttttctgttctttaaatttgaatgaaagtttggcattttaaaaaactttaggtgatttaggagtataattttaagcagatttttagagtacgagtgtccacatatttaactaaacattcaaaaattagttaaaatcaatgaacttgggaaggaaaactacttgctacataatccagaaaattttactaaattatttgaactaagcatgactctccaaactgtggacatattttctcaagggattctatgtattatggcttcaaggtacttttgtgtgtacctcaaaatggctgaaggcattttaacagtgcatctgagagtgtcttacttacatattatttgtacactattttatctatatctttggacattttatatttctgtgtaagtaaaacttccatgaaaatttcatttgtcaccatattttcgttatgcagataagaaaacgaaagaagccaaattgaagacaagctctgaaagggaatgtgcgccctctagtgacccacatttatttatcataaggacataggcagcttttgggtttcatcattttaaataaactttacatttgattttaaaatatatgactcaggattttcaacttgagtatattatattgtatgatcatagatttattactctgacaggatttcatctatcatttaagagaatatttctattaacctgtgttaaggtgattttcttgcacagaagtgtgtttcaaagggactttcaatttattgaaaatgaaaaataggctttaggcatctgtggcttagcagcattttatttcccatcctctgggtcatgcagtttttgcccacgtgttttcacactccttggctttataactaattcctctaatgtagcagtatctgacattttagaatttgtgggggtttcttaccttttaatttttaaggttgtttctctcaaagatatttaaacaaaacttataaatgtgacatctgttcaatcatgtcacactttagaaataaatattaccaatgaattttgaaatgattaagatttaataccaaattaaggtaggaagattattttaacatcatttctacctaccagacgtcaaaatattttaggtaagttttactttgtgcagagaagcaatattttacagcagttttattctcttcactgcaatcaacgattctatgggtgccaagatgaatatcaataccaaataactcagacatttttggcattaatagcttaaaacattaaatcattcaatttgtatgcaagggcatgtattttaaaaagcagaatttttaaacatactaagtatataattcggtatgccataattgataataaagaagatgtacaattttaaggacaatattttgtgcttggactagaattcagcttttgaggcacatgttaaataggcatattttaggacaaggtaaacgccacagaaattgattttttagtatcttttaaagatgcctttcagtgcaatctgaaatcattaaattttactgtactgaaacatattattttatgagtgatgtgcttaaaattacacatataaaactagaaatacatttgagaccatgcaaatataaggaaaaatagatttttgataggaatgttaatatagcagtttccactaactgaagacagagtcctctgtcatctgtcacattgttccaggtgctgtgtaaaccactgaagagtttataggctttttattataactgggaattataacatctttagattttatttaatttgattgctagatgaatagactaatgtaattggaatatgaaagccacaatataagcaaagctgatctcagtttttgtatcttgggtcaaaacctctttaattagagaggtaagtaaacatatttacaagtaatttttaaaaagcatttgtattgtagacccagaaaatctgagacaggtctcagttaatttagaaagttgattttgcctaatcctaggtactcgggaggctgaggcacgagaattgcttgtccccaggaggcgggggttgcagtgagattgtgccactgcactccagcctgggtgatagaatgagactttgtctcaaaaaaaaaaaaaaaaaaaaaaaaaaaaaaaaaaaaagttgatttttgccaaggtggaattcgcgcgcctgtgacacagcctcaggaagtcctgacgacatgtgcccaaggtggttggggtgcagcttggttttacacattttagggaggcatgagacatcaatcaagtacatttaagaaatacattggtttgacctggcgcggtggctcacacctgtaatcccagcactttgggaggctgagtcgggcggatcacaaggtcaggagatcgagaccatcctggctgaaacagtgaaaccccgtctctatgaaaaatagggaaaaaaaattagccagacgtggcggcaggcgcctgtagtcccagctactcgggaggctgaggcaggagaatggtgtgaacctgggaggcggaggttgcagtgagccaagattgtgtcactgcactccagcttgggcaacagagcgagactccgtctgaaaaaaataaaattaaaaaaaaaaaaaaaaaaaagaaatacattggtttggtccagaaaggcaggacaactgggtgggggtgggggcttccaggctgtaggtaaatttaaacattttctggttgacaattggttgagtttgtctaaagacctgggatcaatagaaaggaatgtttgggttgagataagacattgtggataccaaagttttatcatgtagatgaagcttttagctagcaggcttcagagagaagaggctgtagagtgcttcttatcagacttaaagtctgtgttgatgtaagtgtcagagaggtataatgaggcatgtctgacccccacttcccttcttggcctgaaccagtctttcaggttaaattttaagagccctggctgaggaggaagtccctttggagggggagttagccttttatttttggtttacagtatgtttttacttcaggaccagtttgataacagcttttaaatttttacaatttaaagcaagaagtcgctgaagatcgaagaaattaatttacccaagaaaataccagaaagataaaaattagggattaaaacctgtggtgcctgatttacacacacatatatagctatgttatttttttttcttttttgagactgagtctcgttctgttgcccaggctggaatgtagtggcacaatcttggctcactgcaacttctgcctccctggttcaagcaattctcctgcctcagcctcccgagtagctgggattacaggtgcccaccaccacagctggctaatttttgtatttttagtagagacggggtttcgtcatggtggccaggttggtcctgaactcctgacctcaagtgaactgcccgcctcggcctctcaaagtgctggaattacaggcatgagccgccacgcctggccctcagctcagtatatttttaaatgcacatttactttacatttaaagcaacttaaacatacacacaaacacacacgtatcacacatattacaaaatacaagacaatcatgtggccctatcttccccccttccacagagggagacacacttacactatacaaacgtgtatgtgttgtgtgtgtgtatacaaactatcttgatttggagagggaactatttatctaaatattagcttgttttcttttggttaaataggatttcccctttaataatattctgtaattccaaaaatataataattgccatgtagtcaatgcatctcaaagtcctaaaaatatttttagaactaataggatttatactgaatttcatttgatatttttataagatctatttgatgcaaattgaatttgtattctattactcgatttttttttaaagcaaatgccatgtggaaacaagcagagagggacaagttttcccagaaggaaagttgaaaggggaagagtagagagaggttgatcaagaaaaccttcacagatgatgtgcatcttgaactgagccttggaagatgaatagtaggtcatcttcaaatggttggggatttagggtcaggaaagtgcctgtatagtaatatggaattaaaatgtcttctcacttcggaaaactctgaagaagaaaggtgatttttaaaaatacagcaaagttggaaaatcttacctccaaaattatttcttctttaataccaacaaagaataattatagttttgttcctattaatgttaaaacttgcttcctagctaattaaaatgttcattaagaattggtttcataaattatctggtctaggcctagagccctgggaccctgcaatggttaacgtatttcacaggcatcagcattttcctttcaggtttctaaggatgaggcttataagtttttatgaaattctacatgctaagatgtttaaatatgtaaaatggccattcataaacctagttcactaatcaaattagttaagtctgggagcttggaggacttccactctcaaagtttacacatttgggaatgatgagttgcaacttgtatattgaaagtgactgaattaaaatttatgtaaatgtgtcatcttagtttaataggttatgtggcagtcactgtaaagaaaattaacagaacacagtgcccatcaggaggctcttctgacataattagcacagttatatagcactaattcatgtaatgttttactattgacaattcaaaattgacaacttcttaaatggcaaacatttctctagttctttgagatgtttgtatgtgtttttgcctttgaatttattttaaacatttatatacacaggtatctctcagtatttaccatatgggatgtaattaacctaatttacatcatttttatgggaaattcaactggatgaggctgagtctgtttgtacaatataatactgagaaaaattgtcactctctgaatatttggtatatatgccccaggcttttgatattttgaaacttccaaaaaatggaaggtctttttgaaaaattgtcttggtgtagtaatacacttttgccaagaaaaaaaaaaatcaaagacttacttgccctgtatgatgggactttacaagttttaatttcaggggtttctgatgagtatatttgtaaaggagaaaaaaattgtcgcttcactgctaaccataaataataacaaattgaggttttaagatatacttgaagaatagaggacagaatattcatcaataattatagaaataatcattttgtgaacagagaatgagaagttatttttttattagctaaaggagattttaagctaggtaaagttagactgcatttaagggatagagtctgataacattcggaagtacgttaagtacagagttaagtatatgaggaaagtaagttaagcactaaggaatatattagtggactgattccaaaggtgtagggacacattatgagcaacttatgatacataagttcattagcaatggttttatgtgagttgttaaagtggggaaaaaagaattattagaaacgagtaattttatgaagaagcaaaaatacatgtacagaatccaacgttgaatatggcattgaaaataagtcttcagtgttttccttgagggttttaaagaaggtaactgagttgcatctgaatgatatatttcgttcgtaattaaatacccaggctcacttagtgcaaagtatgatagaaaatgccatctgcaaagcactgggaagagtagatagcacccaatttaaagcatgaagacatttaaatcagaggtgtctgttcatttgccatgcatctcagcaaagatatctgaggaatatctagtagcagtgaaatacatgaaaactacacgacaaaccacaaaaagtgatgaagcgatagttgctaaattgataaggaataaaataaacgtgcaattgcttcttggaagccagggtctgagtaggatccgggaaggagactgagttcattgtgcattgaaaatgtcactgaacctaaaactaagcgttggatgtaggccattggcactcagggagagtacatgggaggccttgaaaccctgcctctgcttcctcttcacccttccatcctcattgctggcataaagagatgaggctatccactggcagaatattggagagaaaacaatgctagtagctgacagttaactcccagaactctaagagatggtggtacatgttaagtattagagtgtaggctgactgcacattatgtgtggacaaaaagagttttagcaaggaaatcagagatgtttgaaggaagaagtccaaatggaagcaacataaaataaatattaagattaggttaggaatagctcagagcttgaattgtgtaagaattgggttcagtgtccacctgtttcccatgaaatcaagatatcacaataatgatagaaatgaaagggaagaactccaacaggtgagaagagtccaaactcattaatatgtttctttgttccattttagaaaagaagtataacattaacctctgtgcttatgaataggttattttccttagacaaaacgctctcctcaccactgccctagtaaaatttgaaattgcctttttaaaaatctgtacatcaaaaaacgagcgtaatcactctccatacgatctttgtataaaagggaagttcacgcactgtatgtgacccctttccaaatttataaagtcagacaaaaaattgaatgaggaaagacctttctgtagaatttcacatcctgttgtttgaattgatttgaattatcagaactacgtgccaactggtgtccaggcctcccttaaaatcttcacagacagagaagcaaacagacagttaccatggtgttgactccacaaagccttctttgtgtggagataaccaatatacttggcagagcctctaggctagaagctgatttaatcctaatttacagagaaggtgttttttgattatcctcttaaaaagaccagtgtgagctgagccccagttctgtgtctaaaccatttttatcttgtcaaacaaatgcttcactaaaccaaattacttgataatgtggactaatgcattctcgtctctgttctttatggagttaatagcatgtctggcacatagtaagcacttagtatatgctttatgaaggggaaaaaaaggagacatttgaccgttttaaaaggaaacatacaattttgcctttttcaggaaaatacacctctaaaagtgttacaagatttcttctggggccgggcgcggtggctcacgcctgtaatcccagcactttgggaggccgaggcgggcggatctagaggtcaggagatcgagaccatcctggctaacacggtgaaaccacatctctactaaaaatacaaaaaaaattagccgggcgtggtggcgggcgcctgtggtcccagctactcgggaggctgaggcaggagaatggcgtgaacctgggaggcggagcttgcagtgagccgagatcgcgccactgcactccaggctgggtgacagagcaagactccgtctcaaaaaaaaaaaaaaaaaagatttcttttggaatgaaaattatttactttcaaactaaaaacaaacaactttgtttcttttttctgcagtgaattggaggtggtggtataacagttacatcaacatgcatgttataggagcagaaaggctgtgatccctttccttcctccttatacaggtcatagcagacattcctataacaaaagataggttaacaagagaaaagcatgagatatttatctaataaaagttttaggtgacatgggagccttcaaaaatgaagacccaatgacccaaaggaaaactgtttttatgcttagagttgataaagagtagacagccatgtaggaatgtgattggacaaaaagggaatgatctgatagtaatagactagggacaaccagccaggcctgtctgtgtagaattccttcctcctacacatggggtaggaccccacttgaatgagggtcttatgatctactatcaaacaaaagtatgtcagagaattttttatggctagctaatagagagaaaggtgggcaaaatacagagttataattctggcttttatggttggctttggaggagagggtttttggtttctatgacctaccttgaagaagaagaattctggttactatgactcacttcagggaagaatgtggagttaaagacaggaggggaggagaaggtcagagggaccttggttttgaggctgcttttgaggccttccagtgttctttagttcaaagtttcagcatgccaaagtgccatactttggggtatcgttttctgagcccctacagtgtgcaaacaagagcaatgtcaattcaacgcctagtagaaatctttctccaacataggcttcagcagatttctttcagctgtcatgccagcctagtaccttgaggcacgtttgagtttcagggacctctaagtagaagtgagcaatctttcttagagatagtctaaatcaaatgagggtgagactagagagattaagtttaaagcgtgaatttgaaagtgactggtggatattcctatctcatatttatgagtcagagggtatttgatgtataattgagtcagacaaataaatttcaccaaagtggcccaaatgcattatattaacaacccagttttcaaaatatttatggaagagtcagtgaaggattttattccattggaggaggaacaagaataaagaatagctctgaattactttagaaaatatgaagcgaaatttgtttctacaagtacttgaataaaagacaaagtagaatatacagttaagaggtctatgaaggccagattataaaggatcatgttgaaattttgttctttattctaagaaaaatgagaaagtctttgagtggttttacgaatgaaggtaacataatcagatatgtttttactaccgtatatttcaaagtagctagaagagaataatttgaatgtatctagcatagacaaatatttaagattatggatatcccaagtacactgatgcgatctttacaaattatacggatatgttaaattatcacatgtacccccaatctaagtacatctattatgcgtcaattaaaaaagatagaaatgataatttttccagtagtacataaaagagagagttccataaatactgcccagaggccaagtgaaaagctattgcggtatttttggtcacatttaatggcaacacagatttgggttctggctatggagacaggaagaagcatacatattcaggagacagagaatgtatgtgtgacagattagactttgcaatacattaaacatgggaaggaagagagagggttttagttggtttgctgtaacaaaataccataaactgggtagcttataaaccacagaaatttatgtctcccatttctggagtttgggaagtttaatatcaagtaactagcagatttagtgtcttttaagggcaggcttcctggttcatacttggtgctctctcactgtgccctcacacggtggaaaagaacactgatctcttcagatcattttaaggggactcatttcatgagggctctaccctcttgacctaattacctcccaaatgccccatcttttaatatcatcacattgggaattaggcttcaacatacgaacttttgtggggcacaaaattcagtccatagcggagatgaagataacaaatatgagggatggtgatgctaattactgatctggggaatactgatagagtactagtttgagggagaagatcaaactttaaaccttggcatataatgtttaaggagattttgcagcatgcaagtggagacatccaataggcagatggttatatagctgtggaattcagaacaagtgcctgaattagagatatacatatcagaatcattgataaatagattgcaattcaaggcatgatgactgatgtgttttctggtgagagatagtagagtagaagatgattggtaatgaactaggtcttgacatctagtacataatgatagggtggaggaggatggacctgcaaagaaaaaattaccaatggtcatagaaatagaaggcaaattagaatagagtggcatcatgaagccaaaggaagaaaaattacaaacggatagtatggtcaacagtgttaactgtagtcctagctacttgggaggctgaggcaggggaattccttgaacccgggaggcagaggttgtggtgagaccagattgcaccactgcactccagcctggtgacagagtgagactccgtctcaaaataaacaaatactagaaattggatggactcagatgcttgagcaaaagtaagagaataaagttcaaaatgtaggtagtgggaatgactttaattaaaagaagggaaactcaaatgtaaaagaagggaatgagaacggtggctacatatgcgggtctgatggtgtttggaaataggaagtgaaagaagttctactctgataattgcacttgtttctgtaaggtagggaacaagatcatctgagagagctgcagaaagaggatgggccagagctttgataaaaggttttaatagttcctgtagagacttagagcccaacttgggaaaaaaaaaaaaaaaaaaaagtatggcaggatgctaggttcatttgaggctgttgattattgccttagtttgggttgccccaagagtagatctgaagagaaggatttaggtgcaagcagtttatttggaaagtgatcccaggaaacaaagtagggaagtgaaataagaaaaataaagcagccaataaagtatggcacaaatatagggatcaggttactgctggaaggaactggggctcaatcatgcagggaaccccttgagacactgtgtatcatacttcaggattgtccaactgaggggcaagggagctgggaaattcaccaattccaagctctcactggttaagggacacccctaaagtattaacattccagcactccttctctgtccaatatactggcaaatagatgcttgcagatagagagacacaggaaattttatgttgggccaaagcaaaaataaaaatgttttaagacattatgatgataaatatgcataaaagatgattgaaatataattcactggtttgggtaggtaatcaaataaccatagtaggagagtatttaaggagttaacatcgctgaagagagtgtgaaagatttttacagcatataattgtactgtatattttaatcaacattatgaatgaagaaacaggaacctgatagtcaaacttgtggataaaaaatgtaggaaagataaaaatcatatatgacacaataaaaatccataaacatttgtaatgcatacacagataacttactgacattcagtgacatgggatttagaggaatcaggatccctagtctcttaatttcaagttggatagcctcgataaataacaactcaatctgtatgctatgaaccgtcaagtttctgacccatggtattgaggtcaattaacttaatttctctgaagctccatctcatcctatgggcagctggaattggtgatacctaaccaaagaattttgtgagaatataaaatgcgaatatgtttttctaagggctttgtgttccattaatttctgtatctgtttaatttttaaacaatagcctgcaacaaatgtgagaaattctaactggtttatatgattcaaagtcccaaaactggagttcaatagatcaggtcatatgtttgtgatagtaattaggttgtgatataactggtttaatgatagtttatgtgaaaaaattcctagaagttttaagtcaattgaattgcaatgtgagttgaaagtctaatattgaagtgaaaatatttattgaaatcatgggctatatcaatgaaagtattataaaccagaaagataattattcttccctgtttattttacacactgctgatatgttccctttaagtacccaatttaaggaaactaagataacaacaagccatagaatatccgttgaagtaattaagcatagggtaggctgatgatcaggtatctactgataaatttaaagagcggatttcaaatatttataattttgtatccttttgccaatatctttccaactactctccacccccaccagctcctggaaatgaacattgtcttctgtttcttttagtttgatttttttttttttttttttttagattccacttgtaagtgagatcatgtggtatttgtctttctacacctggcttatttcacttaacataatttcctccgggttcatacatgttgttgcaaatgaaaggctattcatagtcttaaaggcttaatactattccattagacacttgggttgattccatattttggctcttctatacctaaatcaccagattagaatgaataatttatccctggtggctccaaagatctcttccaaaaaaaaaaaaaaaaaaaaaaaaaaaggtttgaaaataacaggataggtgatctgatatttatggcagcataacaactcacaccaaaatgtagtggcttaaaacagcacctatttattatttctcctaattcttcaacgtaggcagtgccctttgggtatttcttttctctatgtggcatcaactggagcactcatttgtctgtcttcagctggcattgagatgggtcacagagggctttatttgcatgcctggtgccccatgcttcttcatgtggcctcttcacatggacagatcaagtttccttaaaacatgatcacctcaaggtcattgtacttcttatataattgttgtcttctcagaatgtgtgctctaaaaagtcaagctctgacatgcaagcacttctcaaaaccttacttgcagtactcttactattgtcccatttgtgatagaaagtcacgtggccaaacccagaggcagtatgattggagactacagaaaagcatgtgtttcaatggtgaccaccaacaggaattttttttttctcataaatactttccaaaaagaaaaggttatcgtgggaagtagtactttttcaaatagtggaaacattcaagcagaggctgggtaatagcttacaggatatattgtagaagtgatttttacattgaggtgaataaaatgacctctgtgatcataagactctagatcaaagctgactccaaatttgagtctacctaacagggaaaatagtgctgctattaatactaatagaggtgtcaggcaggagtctcagattgagaaaagaatgataaatgtggataaattgctttttttaatatagaagaaagagataatcaagaaataatgacttttattttttgctgtcttaggttggatgttgatataactgaacttcacagctggattactcgctcagaagctgtgttgcagagtcctgaatttgcaatctttcggaaggaaggcaacttctcagacttaaaagaaaaagtcaatgtaggttatgcattaatttttatatctgtactcattttgtgctgcttgtaaactccgtgctttgttatctgtgattctactagttgatagattaatgcgatatgataaaatgctgtttaatatgtcttaaaaatatattttagatagcaagcaaaatcaaagtttagcctagagaaatctttctggattcttctgtgactgactagggatgcctttcataaacttgccttaacttacatattatttaactataaattaacaattttatgacattaattcatgttgattcctttcatatattgttcagttacctcaaggctaggccttagcaagcttgcacaattgtgtagagtagaatagagtaaaatagaatagaataatataatagataccatacttaggactatgtctatattctcactgttatcaaaaagttattctttatagtcatcaatccctgtcatatattataagatatttaaatttcccagatatttgtgtattaccttatctaaaaggtgtccagcctttctcagtatttacatgtggtagcagatgctttgttgttgttattcccttctgagatggtataattttgaccttcacaaataggaagttttattaatttaatataaagtgtttcatctttagggaaattgtcaaggctttaatttttcaacttcaacaattataaaacatgcatctttgtatatgattggcaacagtttgtaaaataatttctaacaggcagagtaaataaaatgggcaagctaaggaagcagtgattatgaatgaaaagtaattttatccatgggaagatcacatctaaatgtgtatattagctctgctttttctctccaggattcaaatcatgaagttcaaaatccattgtatttttacaaatacgacattacctcagttacaagctaatgtttgctgttggggttggaacttttggagatcaacaaaagatatatatatattctggaaaaaaaatctattttttaggctgcttgaaaaagggaagacaattttgtcaccagttcttcttagagttaactacttataaattggaaagctattttaaattacttattagctttataagacatgctgttgtcagcattataatagactattctaaattgtttcaagaaatgggaaatatgaaaactgaaagataatatataattgtagaaaattagctaaatgtcttttttcaagtatacttctttgaaggtaaattgtttgctgtgatttttgagggaaattctcttagtagtagaaaattaattagagaacattaaactctaattttcaaacatcatgttacatatttgaccactgaaagtatgaatcacctttagcattttattagctaattaaaaatgattattgatctgattctcacaggtttctgtctgatactctgtttctttatcttaagacagctttgatcaggcaggaaaattgagtttcagtatttcaggaatataaattttaaaagttcctgttatcatgtggttacctatgaacgatttgcattttatcaatagcgggagcatgacagactaaaagtgctcaaaaatgtacagtgttttataactggttttctgataccttgtgagtcccctttatcaacctgaactctcattttctgaaataacaacatcattcttaattgcctactaaaatgggacatgaaatgatttaccttgatgtttccctcaggctaaatacaatgtatatgtattaaaaatccttgagagaaatacataattacgatgatggatattcagtttaggtatccattaattttcttactacatcacctgtcggtttatataggttattttaaactcatggcaggctcgtgtcatgaacttgagtggtattaatccatttttaggctttcattaaaaatggctaaatattaccaactcttttttttttcacttgatttcttcatttactcctttcaaatgcttttagccagttagcatatcataggccattatcagttcaatttcacatattttaaaaaatgcaacttttaaacctaagcataattttttccttgtatattcaccatgtgttttattcatataattaacaaaatgcacttatttaaaagctgacttctgggggacctttctaatcaaaatgtccctggaccaccaatattgacattatctgggagcttgtcagaaatatagaatctcagaactagtaaatcaaaatttgcctttgaacattttccaggagtgattcctatgcacataaaggctcgagaatcaatattctaggacacaatcttgggctttacgtagcagttacctctcacattcttttagtatcactgcagttcagactttttagctgaattaacagattctaacaactcgaattttttccgtgagcacatggtaacgcaaattggtaatgaaacaaacaaaaaaaatagcctcctttgatcacaaggggatttgataaggtgtctgaaaatctggagcttctgtgaggttctcttgaaaccctccctatcaagtcgttatggtcatctggctttgggctcttcctcggatctgcacttgattaccctctttcagaatcaactttttaccaactcccgctggaaatcatcaagccagttaatgcttccaatttctcctatctctgttatctgtgtttactacccagagtataggtacctcgagtctatattttcttctatctttctctctctgctctattgcactttcttttccttgcttcacttcctctgctttcccacactctcactcggcaggctcaaacactttttcaagacaagccttctatatacttattctactcatacgtggaaaccaattttaccctcgaaaacagcactatgactcatccctcttttgtacccccactactttagaatgactgactccctcacctaacagagacaattccaaagatactgctctcttcatgtaaaaatacctctttccttgcagttaatgacttctggccatctcttatctaccattttatcatattttctcattgaagactttggcactaggttagtagattttttcaaccaatttgttctttcattcttagttatttcagcatccctgtgggctctcctgctatcactaaaagctgttgtttctctcatctcctcaattcagctacctgctgtcatgattgtatgtatgtagatgttgtcattgtcaggcattactccatttctttaataagattatttttttgagacggagtctcgctctgtcccaggcgggagtgcagtggcgcgatctcggctcactgcaagctctgcctcccgggttcacgccgttctcctgcctcagcctcctgagtagctgggactacaggcgcccgccaccacacccggctaagtttttgtatttttagtagagacggggtttcaccgtgttagccaggatggtctcgatctcctgacctcgtgatccgcccgcctcggcctcccaaagtgctgggattacaggcgtgagccaccgcgcccggcactaacaacatattttaacaaaaccagcagttcttcataagctttccgtgcatcctaagtatattttcaacttagtttctctcaacaattatttcaagcttttgtggggtacctaaactttccccatcattcacagtaaatgatttcatctcctactttagtcgaaataatatttctcaaattgtgggtatttgtgctcatagtatcttttttttttttttttttccacctgccttagtggaagaggctatccttcacctggttgaggctcatctctgggtgtgtgttctcagcagcatcactgactatgtattaagccacctggttccattcagctgtatatccagattgtcaaaaatctacatcccaggtctttatcattagcttttaaaccggttgtgttttcatcttttagaacgtgtcctctcctataaacatgcatgtgaatacttaacgtgccttatcttactcaatccctctgtagaactagaacctattaacctcttttccctcatgaaattctttcctcgcttggcttatgggatactgctttctcctgattaattctttcacattcttggccatttgttccaattcagtttttctttaatattgatattcttcagagtccttgtgtttcttctctggatatcctcattcattcccattcaaatagtgtctattttcaaatgaacccttctcccatatgtatctttagctcatctctttcttaaaacccagggtgatatatctgactgcctaatagacaattttaattgatgtttgcctgatatcttaaatctcattatttccccagacctcctttattctttctccttcctttcaccctgcaaacagcctaatccagaaacctgaaagtgaactgggtcacctagatttttcttctaccattcacaagtccaatctttgacaggttcaattaatcctgctcccttaacagctcttgaaaatgtccagttctctctattcccatcaccaaaaccctgattaaagctaatatcatggcttacttctatttaagatgacaatcctgtagctggtcttccctgctactaatgttatattcctttagaagtttccacatcacctctgccaaagcgaacatattaaaacctcagtatgatcttgttatgtctgtgtttataatcatttgagaaagataaaatcagctactgatagccaggagctggcttggcacttcagttaggctttggaactgctagatgttgccttggtacttgcagccagtctgatgttctctggttgaatataaataattgctagggatgccagcatcatacagggacacgctatggttgtgatgaatcaagataaaagcaagaccactttgtaatcatatcttaatacagtaaaaaagaatagcattgtccaaaccacgcctaatgaccaaatatccctcatcttcattaatgtgacacattatgcttctttactaaacacagctttagcctctctgcattcctcctgccatctagataaaaattttaggacactcaacatagaattaccctacttccttacaacatccaatcaaaacaaagccccacttccttgatgccccctatcatgtaacacaagcccacatcttaaaataagctttttctaacatactcttagagacagccccatagttccctgtgatgcgctgtctctctcgttgcagcgtgtaaatcaggttaactttgataacctacaaatatgttccagtggtctttgtctgaagagtgttgacaaagtccatgtcttcatattgccctcttaaagcctacaatgatctaatttttgtttacttgcacaaactaatttctagccattttcatttcaattccattgttggtttctagaaatcaggacttgaacgtgaagtggctttggttttatgtgtgtgtgttttgtttttggtgtccccatgcctaacacacaaaccaataaatgtttaactatatggatatgtgatttttttcagttctgcagttgcatttaagataggatctattaccaatatgaaggatagaacaacttctgaataaacatttgagtgaataagttactcttcagtcaaagggtaaaacttcattatagaatgttaaatgagtagattcttaattacttctaatgtcggagtaggactgatagagatccataacttattttcataatgttagagaagatacagaaagaggaggcttttaagaggtgctaataaagaaggaggaacagaggtctgaaagaggttttaatcaacttattgaggaatttgtgaacttccctgtgttgtattctttgcttcaaattattttacttttcttccttttattgaatattatataacttagttgccttttattttgcatttaggttacccattttagtatttataattcttcatgatctctaagaattttcatgagcccacaataatcactcatttctgatacattgatttactgatgccttttttagcttctgtatactttacttgaaattatgtgtactaaataatttagaatccgagtagtggcttctaaacatgtgatcatatattaagcatatattgagtaaagtatttagtattctatatgttaatagcataatttaaaaactgtatgttatgaaatatagatcctttcaagattaaaaatgtatatgcatgtagacacatatatgataaacagctctatagaaaaacacacatacagaaaagctggatgacttcatgaggacgaaatttaagagaaagataatattgtcaagggcagaggtatttttatgaacatggcaatttcgaggaggtaattgtagtttttatcagtactgaatgttgtaagaagcatttttcctaacaagaagaaaattaatgactttcttttctttttttttttttttttttttttcccgagacggagcctcgctctgtcacccaggctggagtgcagtggcgcaatcttggctcactgcaacttctgtctcccgggttcaagcgattctcctgcctcagcctcccgagtagctgggactacaggcacgtgccaccacgtccagctaattttttgtatttttagtagagacggggtttcaactgttggccaggatggtctccatctcctgaccttgtgatccacctgccttggcctcccaaagtgctgggattacaggcgtgagcccctgcgcccggccaaattaatgactttcacaaaataactttttgtacagtagtgaaggctgaagtctgactgtaggtatttggagtaatattgaaatactggaatttggactaatatggtaatattagtccaaatttcattgaagatgaaatatataaaagaaaatgaagactgtggttgaagagtattcagatgatacccttggtcttgaaaacatgggaaaggggtatatatacagtatgtatgtgtatgtacatatatgtacatacacacacatagagagaggaggtggaagatcagagccatgaaataaaaacagagaggtaagattctaccaagttttgactcatggattgtatatggtactctttcttttctacttaggtattggtttattaccagtatcaggacttgagctgaagaaaagatggatgtgcccaactccctaactaatatgcagtttctagaatactttgatttaatccatccttcctttactgagcttgcagcacctgtccccatgtactggttttatggccactttatataaagctattagagttcgttatgaatttgcactttaagagagcattgtgggtaaggggagagaccataatattgtatatggacgcgttacgctaaaatagagctcgccttattatgtacctataatgtaccagccactttcatggagacttgggatagagtagagaaggatatagataaggatacctgaccttatatagtttacattctagtgggaaagatggaaatgaagcaagactaatatgtaaagcatgtggaatgttagtgataagttccaaggagcagaataaaatgagagggtatgcatgtgcttgtagacagagtggcactaaaaggcctagctgaaaaagtggcatttgatgggggaaaatgtccaagtaagtaatttagggcctttttaggcatggggaaaaataaatgcacagccgtgtaacagcagcatgcctgtagcatcagggaaaaggtaagcgtgtggctgcagcagaaaaatcacgatgtttagcagcagaagaattcagaaaggttaaggaagttaattaagatcagaccatggtaaggacttgagcttttattcagctgtcagcgagttgagctgaatcctgttgtctctgtctgctgtgttgataatatataatcagagaacaaagggtgaaatataaagacctttagtatcctattttgaaacattcatacccctcagagatgatggggtactttgtctaatgtggtagtagtgagcaccatgataactcactttctggctatgttttgaggttagagccaacaggactttgtgatggattgaatgtgaggcttgagagagagaggggagtggaggattctgtttttggcctaaacaaaggaaaacacagattgaggcctaggacactccaaagtgcgagctcagggacatgattaggaacctgcaaaggagatggaggaaaggtgacctctgaagttggaggaaaactgtgttcaagtagtacgtgaagccaaattagcaaatacttctaagaagaaaaaggaatcctctcaatcaaatcatggtgataggtaaagtgagaactgaacatcagtcattgaatgcagtagcttgggggccaatggtgagactgataagagcagttttgatgggactgagtaagagaatagatgtgagagccagtttttgtttttgttttgaaccagtttttactttgcaagatagacctgtggaaggcctatgttcctctttgttgatacacagtcacttaaaatgaggacagttatcttcctttttcagcaaaatatatctctttagactttgtttttggtttttgtgcttttctgtgctttttaatgtatatttctgtgagttaatgggagacggtagaaattttaggaactactgatccaacctacctgaaaacagaagttcatatatttcatttgaggacgaacgtatgggtggccagatcccaggagaaatggcgattttcagtgatgtttatttacttaacctttttttttttttttttttaacactttttatatgtggttatttggacatttccacgaacaaggtactctcatcatctcttgtgtcaaaaatgtttccgtggccaggcacggtggctcacgcctgtaatctcagcactttgggaggtcgaggcgggtggatcatgaagtcaggagatcaagaccatcatggttgacaccatgaagcctcgtctctactaaaaatacaaaaaattagccgggcatggttgcgggcgcctgtagtcccagctactcaggaggctgaggaaggagaatggcgtgaacccgggaggcggagcttgcagtgagccaagattgcgccactgcactccagcctgggcgacagagcgagactccgtctcaaaaagaaaaaaaaaaaaagtttcctaaatttctttttaagattattgaagttacctttaagtagaatgagcacatatttcagtttgtcgggtatagtcttagcttatgtcaaaccatttttctcagcttaattattcctagctccccattttactataaaaactatctcattttgggaaataaatagcgagcttcctttaatcccctcagaagtcccacatggtaggtatctttattgctattttacataggaaatactgaggttcagaaaggtcgaagtactttattagggacagatagtaagcagtagagacagaactgataacagcagagcaaaaagggtgactgcaggcccttttgttgtagtatcttctttaacatctctttgttatactaaattttattatttttaatcaactatctacagctgtgtctgaaatgaaatgttttctgggctcttcactgtctcattcacactcttcaaggcatacttgtatgcatattcctcttcattttgcaatgttcctcttgaaagtaatgtgccctaacagaacccagatatcgtctgaacattgacaaatatgcagataccattgactgcttctttctggggtctatgtgtctctttatgcaccagttattcagtttatttgagctgtatacagagttggtaatcagcctatagactgtcagagaccattctgagtgacccggcattccttgtgatatcttgttggccctgctgaattaatagttaaatatgttgaacatccctaatacatccaaactataagctctgtttgctctgatatatattctgatacgctcacacctttttgaataatatccattgaaatacccctagcaacagcagagcatgtctgaaagaaagctgaaattataagtagaagagcagggttctaatattgaatctaaaacttcctaatatgatgacctttgatatacgatttaatcttactgatgctcagttttctcttgtataaaatggtatacaacaatgctgatttcttctttcttacaattattatgacatacatatggaaattatgtacataaactataatttggtagtataaggaatcttattttcaatgtggctattgcattgttttcaaaattttcacaaacctctctgtgcctcacttccctcctctgtcaaaatgggaaagtaatagtacctactttatagattattgtttttgttgtagttgtggtggttgttactgagactatttatattagaataactggaacaatgtggttaacaagatattaaaggtcaaatatgattcctgagatattcaaatataagttttgttctctgttagtaatattaattgattctagtaagcttagaataaagagattatgatgataacatttagagggctattgataatttattttcaatatttataaagaccacatagtgttctcattctactttttatatcatttcacaaaaactaaagcaaaagctcaatgtagataaaatagaaacccctctgataggagaagataactctaaaagtaactcaaagaacatcactttactcagcttgttgtcattgttcctttatgtgttgtattgtggtatatattttttctttcatctgtatattgttttctggataaagttcaaattctggacaccccaaatcctcctgtctttcttgatatttacattacatatttacttaaatgtgcttattttttctcctctaagatgctcagggtgctttccatataacatttaccttttaatggagaataaatgtaagtagtgaaaaacaagtatgccataagctgctaaggacagataacttagatcacaaaaactaataagttgagaaaatagaaatattggagcttcatctaggatcttacttttaactagatgttgtagctactctattttcatggacttttcagttcaaccaacaaattagaaccatccatgattgtgcacgttcctggaaacaattcaatactgtctttgtgaaactgaatttcaagacaactcagaagttttacctgctaattggaaagggatcctgggaacataaaatcacaaaataccacaaactgggtgctttgaaattttcaagtggaatgtaagatattaaaaagtgtctgtcactttcagagtttcttaactaattagacaaaactgagttttcatttgttgcccttcagagcaccatgtaaaatgtgtatctttcagctaagagataggtatttaagaaaataaaacaaaattactaccttatagattttttttaaattttactcttaatttattctcagttttaattagtattttatatattacagctattcctgatggagtttattctgtgaatgattggcttttttttttttttttagcattttgtactcttgatattgaatccagtattcctaattcatgaaacctttttttgtgattttaatagactccatttttagagtaattataggttcacagcacaattgaacagaaggtacaaaaatttcccatataacccggctcccacagatacatagcctgccccactgtcaacatttcccactagagtggtatatttgtttcaacagatgaacttacattgacacatcattatctcccaaagttcatagtttatacattagctttccctattggtgccacacattctgtgagtttaaacaaatttacaatgacatgtatttatctttagagtgttatgcggtgtaatttcactgccataaaaatcctcaatacttttcccgttcatctacacttctctcctaatctctagaaaccactgattgttttgtagtttacatagttttaccttttccagactatcatatattcggaattggaatctagggtgaaatcctgcggtaaaatatatagccttttcagattatcttctttaacttagtaacatgcatttaagttcttccatgtctttttatggcttgatagctcatttttaagcactgaataatattccattgtctggatgtctcacagtttatttatccattcatctactgaagaacatcttgattgtttccaagtcttggcaaatacaaacaaagctgctgcagcattcatgtgcaggaatttgagtggacatatgactcctttgtgtaaatgcctaagtgcatgattgctggatcatatagtagaatgtttacttttgtaagaaacctccaaactgtcttccaaagtggctgtgccattttgcattgccaccagaaatgaatgagagttcccattgccccatttctctgtcggcttttggttttgtcagtgttcttggattttggccattctaataggtgtgtagtggtatctcattgtttaatttgtaattccctggtaacatatgatgtgaaacatattttcatttgcttatttgccatctgtatacttcctttggtgaggtgtctgttaaggatttttgcccatgttttagtttgtttgtttttgttactgagttttaagagttctttgtgtatttcggataagaattctctaccagatatgtctttcgtaaatattttctttgagcctgtggcttttcttttcgttcttttggcagcatctttcacagagcagaaccttttaacttagtactattcaacttattaattctttctttcatggatcatccctttggtggtgtatctaaaaaactatcaacaaactcaaagtcacctctgttttctccactgctatctgctaggagttttatagttttacattttactctagagtctgtgattgattcattattaattaactttatgaattatatgaacaccacaattactttcaagcagttacacaaatttctaaattcagtggaaatgtatttatttttggtatgtttatttttcatttttattttattttttataatttcaacttttggattcaagagtaaatgtgcaggtttgttacgtgtgtatattgtgtgacactgaggtttggtgctgagcatagtatccaatagctactattttggaccttttcccctcactccctccccactctagtagtccgcagtgtttcttgttcccatctttatatccatgtgtatccaagaaaacatggttttcaaccataatgctgtgttccacaaaaatatatgttcatgttattttattttatttatttatttttgagacagagtcttactctgtcacccaggctggagtgcaatggtgtgatctcggctcactgcaacctctgcctcccgggttcaagggattttcctgcctcagcctccagagtagctgggattataggtgcctgccaccatgcccagataattatgtttgtatttttagtagagacagggtttcaccatgttggccaggctggtctcgaactcccgacctcaggtgatccacccgcgttggccccccaaagtgctgggattacaggtgtgagccactgcacccagcccatgttatcatttgtacagatatattcaatgttgaaattttaaagtgaatttgtgataaaattcacaataatgtcagatatttcaccatcaaaagtataaacttccaatgaagttgatccagtgaataacatgaaagtaaataaattggaattaaataattgtaattaaaacaaaagaagggtgtaaggtttatgcctagataaacttttttgcatgtagatgttgtgttgttcaggaccatttgtttaaagactttttctccactgtattgccttggttcctttgccaaaaatcaattgattatatttatgtggatctgtttctgagctttctattctgttccattgatttacctgtctgttcttttgccaatattactctgtcttgattactgcagttttatatcaagccttgaagtcagatatcgtcaggtctcccacttaggaaactctttaaaataaatttttaagaaaacctttattcaggccaggcacggtggctcacacctgtaatccccccgccccaccccagcactgagctgggcggatgatgaggtcaggagtttgagaccagcctggccaacatggtgaaaccctgtctctactaaaaatacaaaaattagctgggcgtggtggtgcacgcctgtaatcccggctactcgggaggctgaagcaggagagttgcttgaacccgggaggcagaggttgcagtgagctgagatcatgccactgcactccagcctgggcgacagagtgagactctgtctcaaagagaaacaaaaacaaaaagctttacatttgtagctatttctttaaattagatagtcttttcagatacataaaaatatgtggattattgtataagcatttacataatttaatgtgcttagtaaatagtgttgtctagatgattactttttctctgcaactatttctgatattgccatattatatgaaagagtttccctctgtcgcccaggctggagtacagtggcgcaatgatagttcgttgcagcctactcagactactgtgctcaagcagtccttctgcctcagattcctgagtagctgggactacaggctcctgtcaccacgcctgactaattttttaaaattgtttgtttagagatggaggtctctcgattttgcctaggctgatctcaaatccctggactgaagcagtcttcctgcccaggccttctgagtagctcggattacaggcctatctcttaactatttgcttttaaaggaatgtattagatctgcgctgtacaatcacagttaacactggtcacatgtaacctttaaattttaaattatttaaaataaataaaattagattaaattaaatattcttttattttcaagtcatgctgaccacctttcaagtgctgaatacccacatgtggttattggctatcatattggatgacacagatacagatcatttccatccctgcacaaatttatactcaacagtggtgcagactgtccatgtatctgttatttgccctcccatctgtactccagtattttacctggaaatatttttttaaatgcctgtggatgtaaatgaagtcttaaaaaatagtctcatgtagaataaccttctgcctcaaattcaagagaaatctttgttataatatgattgttaagtcacaggtgtgttgttcttactatattttaattgcgttatagttatttgaatagttatgttttaggacatacacattgttatagtcaacacttcttgatgattatagtaatgtagttctactctgtcatagtttaaaatttatgtctccataggaatattattagctaaactcaatagtatgaaattctggctattgttaactgaaataattttgcatttgtggttcaaaatgtaactcttaagggaaataaaggaattcagaaagttttttgaaactcaatcttgtcttccttggaaataggagtactttgattatttttgaaagaaaaattagcctacagcctggtatttaaatatatatgtacatatattatatatttctgctaaattatttatggtagtttattttttccatcttatatacatactggattctcaatttgatttttaataccgcctatatacttattagtaatttcaatggtgtatctttaaaagataaatttcattttagttatgtgacactttatctttcattgttatgaattgcctttttactttttgcagtcttgcgttgaaatgtatcagaaactataatgtaaaaaaaagctgagtagaaatcttataattaaaagttgtagcaagtcatgaaaatggctcatgcttttattgccattttgatgtttttgatggcaaaagtgttgagaaaaagtctttagattcacgtgataagctgacagagtgaaacatcttaaggcttgaaagggcaagtagaagttataattattgtgtagattcacagtccttgtattgaattactcatctttgctctcatgctgcaggccatagagcgagaaaaagctgagaagttcagaaaactgcaagatgccagcagatcagctcaggccctggtggaacagatggtgaatggtaattacacgagttgatttagataatcttcttagggatttgataaacacataggttcatatttatcagctgaattatatcagacaagcacttgttaaatacaaatttaaattaaaaggtgtttgtatgttttttattattctttttttaatgctaaggaaattattaggagaaattcaactttgagttcattggaagaaaatgggatgtggtagaatattttatcagtctgtagcagagaaataaattttaatgcaaatctgctagaatttatccaaataatttaagaaaataaggttaacagaaatttgaaaacattaacagtcatgttatatgtgtaaaactgatcatcatctgattttaaatcatttttgcaatatgtttttccaaacactaaaattatatggaatgttttaccgtcattcctgttttgtaataatatatatgacattttctgtgttactttttatcacttcctctcatttaaaaaagaagtctcttcgggataacctttacttttaagtaacttttttagagtgagataaaagcacaaagctagccaagtttttgtctttctttttcaagaataaattaaaattaatcttttctaatactcagtgcctcaaaagttatgtgtaccaaatgtgtcattgacatgatatgtaaacaaccttctttcaaattatcattgctatactactatatttccagataaaattttacgaaaatcagggataatgctatttccaaataagattatttttcattttgtagaagacgtttacaagaacatcataaataaatacaacaaatgtttttgttgtgcatgtcagcttttttcagaatctgcctgcattttggggcataaattctgtgtataagttattttttgccttaattgcaaatttggcattcaaaagttcagtggtcttcctagaaaatcaattcattttcttcttctaatgagtcccatgactgactgtatttggttaaaaatgaaaacaaacaaatataacaggtgagacttgagtgaacaagtttaagaacaggtaatgaaaataccagtagatttttatttagatgtatgttgcttggtaattttaactgatcaacttaacagcatattcatgttaaataaaattatgtgatctaaaaatattctcctagttgttatgtaagttccccctagaaactgtattatcactttttcattttaataagctgatgcaagagctatactttaaatggtctcatgtcatagttatatatcaagcttacctacactgaattaatcagaaataatttaaacatttagaaattacgggaatgatttttaatttttggtaagtaaaactacatgcaggatttaaatgatcgtgtgactagtgagaatattaattttcttgattatttccctcatagttctaatttttggaggcatgtagaaaagtcaggacacatagtaggtgcttagtaaatattaattgaccagattctgtttagaaaagcaaaattaaggcagtcgttgaggtaataacgttggtaattttggtgtgaaaataataatccatctgaaggaaaatgctaactttggcagataccagggaacactggggggtaggggtgtgatttgagacattcctgtttggttgactgtgttaatcaaattttatgctacccttttgttctaccagtaaagatatggtcgaactgatacgtcattaggctcaagtttgggccataactaggatgactacttaaaatgaccatagctctgtttccccattaaataaaataatttatgaaattacttaaaggctcaaatattctaacttatctatttgttccgtttttgtcgttcaaggaacaaattgcataatatttattttctgtgattgtgcaaattgtgagataagctagacacatattaagtgcctgaagtaccccttcaggtgtatttcagagggactgctaccctaaatcataatagctcctttagtatagagcccaaaagtacagttgagtggtgtagctcatgaagctgaaagacaaatgaagctttctgtaaactaggagtccagcaattattgcattaaagctcttaaatttataagtccagaatcttccttcccaagcttaggctatggagatataataaatctcacaaccacgtaagacacatacattcttgccctttttgtatagaaaggaaaatgagagctgaatcagtgtgcttcatttaggacctcatgtaaatggctgttcctcttaaccacgtatagtttcctcagaagttaagataaagatgaaccactcttgtataaaccactcatattattatgccactaataaaaatatgtgcgtatatatttataaatttgatgtgtgcttaccacagtgaaaatatttaacatatattcatagtgtaaaaatatgtagaatagcataagtatagctattatagattttaaaaaattctgtgaactatattttatatgtatctatactggtatatgcatagcaaactgaattttctacttaaaataatttgccctaagattaaactactttttaaaaatttagaataattttgtaattcatcagtttgcttttagaatgaaattccaagatggaaaaaataatttctcataacttaaattttacttcagttttgacctgaaatggtacatcagacatatttccaaatgatttctgtccgtttctaaatgtctatgaagcattgaagattcaacatcacttaagtaatgcagaaaacaaaatctgtttgtcctgaaggcaatttgttgaaggaatttaagacatatgctgagaagacaggatagggtgttaaggttgttgaaagtacaaaatttaccatggttacaatgtagaagggaacctcatttgatggtgcaaagtattgttaaaaatcagttgtacgttctagaaacagtatgtctagtaacatatgtacagtttttcagtgtcacatacaagttttatgatcaattggaagatactttttattttcactgtattttatcaaatgtgaagagttgtatgcagaattttaaaacagttaatattaaccatatcattaattttacagcaataatttgtatattaagagtttattgaccgtaagagattcttactaatttatttggaatttttaaccaaagaaatgagttggccaaattccttgcctgctttaaaactatacatggacgttttccttatggatgttccagttcttttggtcagagtagaagtgatctttcacgatcatagactaaaaagagaagctactaaaaggagagtgttaactaaaaaaaaaaatcacgtttctggcattttggcatgaaattttggtataatttttaactgatttatctctatcttagctgtattttttgtttgaactaacattaaaattaatttactgttcttatgtcagcattaattggttggataaatgtgacagaatattggatggtgcaaagtacctctttttactagagacatttttggatagctgtaattttcatgcagcttaccgtcaatatgtaagctttggatcataaccctggtctcaggaaactgttaacttaatgagggcaagtgagaggctagaccaggtatctagtgatgtatttatatattcatgtagctgtgcatattgaaaagggagtttccaaattctttattttactttttaagaaagatgtgatataactttaaggtttatttttacatttcttaatttaaatacaaaatgttataaataatttagaaatttagaaaaatttagccattaaatatagtaagtaatctttctaatgctttaataatattgctaactaataatggttttctaagattttaatttgaacagtctttaaactgatgcctttcatgaccaaggcctttcagtgtattattgagattgtggagttttaggacaacctagggctaaaataatatacatatgattatacctaaacatatgtctgtttttatctatttaggattagacgtaatcctttttgtaaaacagtgttctcgcatgagtacatacagtctcatcaatcaggcataacacaaaaaagcctagtttagataaactggttttccatattaatactgaaattaccaaaagatgaccatatcaaaacatttatttgaaaacatatgtaggcgtagctcaggttctcgttctttagtctctaagatcctttcaccataatttctagaggagatactataattatgtaatagggttagttaaattgtgattcattttcaatttctatttgtagttttctgtgtgttaattaagagtctaaggacagtcacatcaaggacatgtttaaataaaagtagtaattattagtatattagactaaagaacatctcaaaactatcattccctgagtgctagattatagtgtttaaggtgatacctgataataagtatgctaactgttgtaattaaatggcacagaatgataacactgacgagagctcttcttatccataacattaaccaagtaactatctttttttcttgtattttggttcatagctcattagataatttcacatgaattatgttatttgaggtgggcaaccagattttgtcagatgggtgagggtagggattatggtcagtctggctcatctcaaagctaaaactctcatgatcactggaaaaactttcagtagcagcaagtcttctaatcatatattttaatggcaagacatattgcaaatagtctgtatacaaatgtggcatggagactgtaccacttgtagtagcccagccccttcatcatgaatgagtagccttccacagttgcatatatttcctcttctcttattccttcctcagtactgggcagtttgatttatatttcttctttctccacatgacacttagtataatgctctacacagagttcacattcaataaatgtttttaattgacaggcacatttttcttcgtttaagtctaatctccaaaaggaagagcctctgtgggtgtgtgtgagcacggcgtgcatgcacgggtgaactcgcatgcgcagacatgtgcgtgtgtgtgtccatgtgtgtgaaagaaagagactgttgttgtcactgttgttgtgggaaatgagtggccaaaacaaatatgagtaaaaatctgactttttttaattttatgatgtttgaaaataaaaacgcaaaagggctatattagtaaaatttatattgccctcactaggggtattacttttatatatactattaatttttaaaagctattactttaagtcagtgtggtcacagaaacctctaaaatttagcctcagaacttgtcttcacaggttttgaatatctctatattacattttagactattacattgaatgctaaatggacttgtaataaccctcacttaaagttcagcaaaaataggagactgtttattagcagctttattttaagtttctattccaaatattcttttaattcaagagctctggaaacacttgttttgtgttattctaccctggcttcatggctaatgatgaatatacttgatgaggaatacttcactttaagtggcagttctgaagtacttgcatggaaggtggtgcacatttaacattattctaacagtctgttatgcactgtacacaagtaataaaattaatggatacacttcaagtaatgatccatttcctctgggtgcaatatatttattcacagactatttcaggggttgtttagaatatgagatgtgaatggattatgatccattatccctgagattctaatgtgctacaacaaaatggtttccataagtattgctcataatgcctggtgtgttagtatttgtattcttaaatagctaacacaaaattagaaaacagatgctcagatgattgatacttaaaacttttcagatatttacacttacaaactcttagaaaagttaaaattttccattgagtcaaggagcataattctatggaatacatataaaacaattatatataataataaaatccatatgcaaatatttacttggataacgctttgaaccctttttcattctagaaaggttttaatggactttcttagaaaatcaacagtagttctggcatttagatggtcaattaattcataaagttgaagtaatagcatttctcattttaattgaagagaggtacattaagtaatgtgacagtgtcggttattaacgtgacagtgtcagtaagtaacgtgaccatcctctccatcccctgcccaagtattttaaagcaaatttgatacaagagagattgtgtgcttgtttgtgtatggcttttggcttcagtgtacattggtctcataatttttatattcatatagagtacactattgatttggtattgaatgagttcatgagtacagtgtagttatactctttctactccaagctgagaattctattagatactgccagtggagacatttcctataggagtttatagtttagaaggacagtttatgcccttgttgagcaggcagcatattcacaatgaattaatacaatgtttgcatacaaatccttcatagcaagacttctgattttctgtgcccaacattatgtcttttctagtaacatctagaaatttccacgttttttttgaaatgttttcgtttctttataacttcaatctcacatgattataaatgtggcagaatattccaggattcccaaataaactctttttatttttattttagttggtgacaggctcttgctctgttgcccaggctagaatacagtgatgcaatcatagctcagtgcagcctcgaactcctggtctcaaaggatccctggttattgataaaacttctttaaaaaatgtataaatacaccttctatatcccatattagtcatatattatataaaattaggactaattttaaaatagtattattaactttttatacatgtcctgtttcagtcattaagaagacttcctctccccctaattttcacacaagagagctggtcccttgttttctgaatattctttttcatttcctctatatggcattgtctaatatgtctttgttgcctagtatgtgtcagcatttgttataagtaagttatatatgttaactcagaactttggtaagtatcctatgaggtcgattctatttttaatcctcatttcatggatgagaaaaacaagatccagtgaaattaagtaactgaacccatttcacacatctagtaaggggcatcaaatttgaactccggtctctttaacgccagaattctcaccggtcatttctctgcctttctgcctgcctccccctttttgctattatagatgtcgttcttttacctatcactgcattttcattgcctgcattcagttataaagatcaatatgcaaataaatagagcgtattataaatttcagtgttatgaatttgtacaaagctgacttttcttcaccatttaaatttcttttacagtgatatattgcaacattttttggggggcaaaacatagagttttgtgtaatgatcaacaatgactcattaaaacctgtccctagattttaacggatactgcagagcctattggtacttcactgtagttttatcatttaacaaaattaacatatccatattgaaaatcaacttatagtttcattttttcatttgctacgatttgtatggttgacctttctcagggacacaaagtgatttctctctgtgttcccgtctcatttagacaaatgttgaataagactcaatccagcatcagtctatcggtccctttaatttagcatttcttttttgcctgtttaatacctggttcatgttgacgtttcacccttcatggacttctaactgcttgttcaagttcaacatatgctgaaaatatttctcctaaatatctgatcatttagatccatgccacattttttgttattaacataatttaaaaattctgtccagtatattttctaattatctttttattttccagaaatgttaacgttttatcataatacttttttcaaacggagtgctcatacgattgaagtttcatattcttctcttacactttataccaaatgtggtcattttataacaacagttacttaatcgcatcgcttaacaaatattttggtacaatttttgatcactcctcaaaatctaacgatcaaaaacagcatgtcacaattgcttccttaagcattaggaggatattagaatatgtagctcctgtaggccacggacttcttttatacttagatatatggagccatgtatatattctttttacattctattatttccattgtatctcattaaaaatatatcagggaagaaggaggggaaaatagttgacgataatatttgcaaagtttgtctccttcaccgccatcctgagtagcattatgctttgaaattagtgaagttacagttgtgtttcaaatgaattgagggacatggtttggcagcattaatatcattatgacaaatagaacattagactatcagggcagagggaagtgaaagaggataaaataatatagttgttgaattcacatctatattttttttagtctttaaaaaggataaagtgggaggcatgtgcaagttagcaaaaccacaggccttatgtttctagagacgttcttcagactttttaagaacttagcttccctttaactaaattatattaccagaaaattaagtaaaatgaacatttataaaagtagattatcttaggcaacctactcttctaccaaactactcttcgaacttttaggtattttaacctagagaaagaaccttacagtgagtttatgttcttttgagatctctgtaggtacatgagggaacataaaacatttaaatattcagtatttccaaagtataagaaagttatcagtgctaatgtagctatgtttaaaaatgcatgatatcatatgtaatatattttctcttttatattctgtcattaagaaaactatataagctaataaatctaagaaagtctaaattttgtaaactaactttagagagtttgaatattttaacccatagcacagcgtgatgttgccatgctttcatgctatgtatggaataatatgtacttggactggcgttcgtcatatatgaaatgacatagcatattccatggtacatagtaggtactccagaatggtaatggtgataatgatatgcttgtgtttccatttttcccttgataaagttttctgggtttggtattactacagatgattttaaaactttgagatcaacttctacatttataaatttaaaaatgtttcacattagaaagattatttttcctagtacttgtttttcttcctcgcatccatggacaatatgagacagagtctcgctctgtcacccaggctggagtgcagtggcgcgatctccgctcactgcaagctccgcctcccgggttcacgccattctcctgcctcagcctcccgagtagctggaaccccaggcgcccgccaccacgcccggctaattttttgtatttttagtagagacggggtttcaccgtgttagccaggatggtcttgatctcccgatgccgtgatcccccacctcggcctcccaaagtgttggaattataggcatgagccaccgtgcccagccgacaatctgtttatttctaatcttctgtaaatgaaataaagaataatcttggattttttttcctctttttaaaactatgaaaatactatttaaactaatttccaagcccatttttaaaattaaaaatgtaagttagtttggggaagtatatttgagtaatatgtatgatatgtaaaatgtatctgaaaacatccaaaatgttacttgttcatgcagccttccagctcccatcagagctttgagcacttttgtttttatttaagtttttatttaatattttatttacatatattctaattttctacatcttatgtcttattacttgatggcattgatattcattgttgtgacgcaagtctgataattcacattgaataatctgaaatcatatttacacatttatatcttagaaaataattgatctggtttgaaatcattcatgtggtgaatacttttataattaggatgtgttggctttcagatcatttctttcagtctgtgggttcaggggatatatttaattatttttttctttctagagggtgttaatgcagatagcatcaaacaagcctcagaacaactgaacagccggtggatcgaattctgccagttgctaagtgagagacttaactggctggagtatcagaacaacatcatcgctttctataatcagctacaacaattggagcagatgacaactactgctgaaaactggttgaaaatccaacccaccaccccatcagagccaacagcaattaaaagtcagttaaaaatttgtaaggtaagaatctcttctccttccatttggagcataatcaataggtatttcttggcaatttccaagaagacagtaacaaattatttagtaatgaaacgttcaccttctaaggatttagctaagcgcaataaagttcaaaatgtaagcaacagaaatctgtttaaatatgtaagacgtagatacccggattctaaaattgtatttggcgtagttacacagcgctaattgattgtgtcggtttgcgtaagcatgaggcagtttaggagtgtggaaaccacatgtatcctgtaaaaaatggcctctcactttggaactctttctttgtgacgagtgaaacatagtcattttgaaaaagtggaatccatggaaatagttagaaacacgggtcaacaacaagcttggatgcagtataactagatacataaggaaaatatttaaaactgatggacctctcaaattacgataatttgaggaaggtttctttacaaaaagatatttttaaaatgtagctggagtacagaggaaccacaccggatagtgtagtaacccagcatcagagttcttaccccttttagtccagaaaggatcagtgagagagcagttatagaaactcagaaggagacagtcagatcctcatggtaaaagcagcatggccggcttaaggaatcctcatagaaatggagtcagacaaataaacaccccacttcacttttttccctgcctccagaatcttgtcagggctcctcactgactaaacttaatcgtaagacaaaggacaaggaaccgtcatctgtaaatatcagtctcctgggtaacaggagaagagcggacagtggatctggaggggcaaacaagatgtaagtggacaaaagggcctgagaaagagatgaaaggattatgccttcaagtgtaagaaaacaagagctgtataataatgaaaatagcctaaactgttttcattgttactatgagctatgtgcttttcgcggggaatgagaaactgattagaggatggactaaaacgtttccaggatgaacgtttagtgatagatcgagatgattacatttaatacaaaaggcaaggagtggagattcatttgcatactgtaaaaaagaatggcttaaataaaggtagaatagacatggaaaggtgacaaggttgatttagaaaaggtattggacccaaaaagtgatgagaaattcaaagctattttgaagagaaaaacaattgaaggacttaatggttcttcaaatatcggacctgtagcattattaggttttctgttcttgtgttagtttgctgaggaaataaactcagaaagtatacttttggataaagaataccttggataaggcacttgacttgttaggcaaatacacacatctaaggaatttctacattgagatgcattttgtaatttaagaatagaaccaatgccgcttttcctgtgaatcagaggaataatccaaatacattatttcttgccacaaaaatctgatgttaccttatccgattcttgagattcagatatagtagttagtaatagtacctacacagtacattcatgcataaaatatatacattaagtgtctctaatgtgtttaagaatgctactgagtgtattaatcagctgagtctgccacaataaataccacagactcggtggcttaaacaacacaggtttattttctgagagttctagaagtgagagaaagtccaggatcaaggtttggtagggttcagcttcatcttctggtgaaggctgtcttcctggcttgcagataaccaacttctcactctgtcctcacatggctttcctctgtgtgtatacatgcagagagagagaatgagggctatttttctttctctctctctttatctctgcctccttttataaagccaccaatccctaagggattagccccccaccccgccacccttacccaaccctgatgacgtcatataaacatcattacctcttaaaagtcctatcaccaaatagtctcaccaatggttaggacttcaacatgtgaattttggaagacacaattcagcccatagcactaagttttgggaatattagagtgggcattcatggactctgcttttattgtatttacggaaagcagagaagagagatatgaaacaatggaatcaatatttttaaatttcctgctaggaacagtggtttaaactaagatgcaaagctttgggagaatgagtaacagggaaaaacgaacctgatacagccaccaagggcatcttccttgagggaggaacatttgagttgagacttttgtgataagttagaattaggtaagagaacagttaagcaagattccaggcagaaggaacatggcaagagggagcaataaaggccaagcacctgaatgaagaccattgtaaatgctgaacatagaggggcagatgaatgagaggagagacaaacaggaatcagtcaggtatataggagacaaaccaatgacttctgggacctgctagtatcttggtcttgatttgaggaacaaatggagatcaccagaggttttatatattaaatattgtctggaggttgaggaagtcatcctaagggaaaatacttctcttactgcatccaaattccgttgtcacctccttatcaccccttactctttctctcagacccattggtgtctattaatttgaagaatcactttaggtaaaatatttagcaagataagcttaatattattcatacaagggcaaatatatatactgttctgctgagattagtgataggtaaataaattataacatgtttctcagcgttttattttatttggagaagttttataacattagagcgcatatttagctcatattctaatgatcggcagaactggtttttaatattgtgggggttagagagccttatcagaattggaaaaaattcatgaaccctttcctgtgaaaaatacaaaagcttccatgagataagcatataattttaaagaataaacagactcaaaggagataccatactctggaggaccaactaaaccaaatccttttatggaaataatggctaattgttcacatctttttaaacacagaatacttcagttgaaaagtatctcttctatgatttattctcagaacattaaggtctcaactgaacatttgcccaaatgttttattagtttcaaagtcccctttgtttttcagagcacacttggctataatgttggctctttctatagccccctgaacgggaaaaatggcagccctccatctggccaaatataaatcaggttcttaatggttcacagtagatgccaatgctgccatttgtaaatctagcatacaaattatttgtatatatttctgtactataaatacagaatattaccctttacctcttgtcttatttcttatccatggatatataccaactttctagcactggtttgagaggatttatatttgaaagagaaatataggtcaccttccattttgctaaacgtctttaatcttcacccaccaaaacgattgaatcgtcagagattattttacctgaatcagctcataccattataaccacataaacacattcctctgaaagctgtatttatgtttttttaatgagaataagtggcattgtacattagtcttgcaaccatgacagaatttatgtgataaatttctcagcctctcctaatacaaaagttactctctcccaaagagtatgaatgcctccataaatattaactttttttttgccttttcactttgattttcaggaagctcagatttcaattcgttcagaattggtataattctttccattttctctttcttctaatgggctcatgttccaatttttaaatttcaattttcctgttgttacatattaaatagtaactaaccctcaagtatttttttctaaagacagcatatatatgaattgtaagtaagcagccatgataataacacttttaaaaagggcagtgaaaactttgagttcaaattatatatgtattaaatacgaaacaattccaacttcactggaaacaagaacatgaaaacatttatgtagagaatagcatgcccttcgcccactttttgatggggttgtttgtttttttcttgtaaatttttttgagttcgttgtagattctggatattagccctttgtcagatgagtaggttgcaaaaattttctcccattttgtaggttgcctgttcactctgatggtagtttcttttgctgtgcagaagctctttagtttaattagatcccatttgtcaatttgtcttttgttgccattgcttttggtgttttggacatgaagtccttgcccatgcctatgccctgaatggtattgcctaggttttcttctagggtttttatggttttaggtctaacgtttaaatctttaatccatcttgaattgatttttgtataagttgtaaggaagggatccagtttcagctttctacatatggctagccagttttcccagcaccatttattaaatagggaatcctttccccattgcttgtttttgtcaggtttgtcaaagatcagatagttgtaggtatgcggcgttatttctgagggctctgttctgttccattgatctatatctctgttttggtaccagtaccatgctgttttggttactgtagccttgtagtatagtttgaagtcaggtagtgtgatgcctccagctttgtcctgttggcttaggattgacttggcgatgcgggctcttttttggttccatatgaactttaaagtagttttttccaattctgtgaagaaagtcattgtccaaaagaaatacagtgctagccacaaattcaagccacatatgtaatttaaaatggtctagaaactatattaggaaaggaaaaagaaacggtaattgaatttcaatagtacattttatttaacctgattcatcaaaaatattatttgaaagtgtaatcagtatttaaaaactttgagattatgttcttagcttttcttaatcttcagaattaaacatattttggtaatttcatgcatctaaatttggaccagccacatttcaggtgcccagttgccacatgagctagtgacagtacagcagtgttcatgtgattttatcatacaaaccagggtactactgagagtgaaacagggtgctactaataattatgccaggacaacaagaggaaacctggacagccaccgtaatttaaaaagtggcaattggctgggcgcggtggctcacacctgtaatcccagcactttgggaggccaaggtgggtggatcatgaggtcagcagtttgagaccagcctggccaacagtgaaactccatctctactaaaaataaaaaaaatttgctggacacggtagcgggcacctgtaatcccagctactcaggaggctgaggcagaagaatcgcttgaacctggaatgtgaaggttgcatttggccaagatcgcgtcattgcactccagcctgggcaacaagagcgagactctgtcccaaaaaaaaaaaaaaaaaaaaaaaaaagcagtggttgcctgtttggtcaggagaagtaatgagaccatacaaaacatagaagattatagatatatttttatatttgggtgtgtacatacatatgtataagtattatatagattttatatgtgtgtatataatctatataattgtatcaaaatatatttataattatagtatacacatatacatatatgtaggtatatatgtaatttatattttgcagaaatgaaagagaaaatattgttcattgagtgagcttaaaatttgaagcaagcgcacatcattttgatataagaggggtgcagccaaacacctatatttgatttatggaaaggatttaaggtcatgcatagtatttttccactgtacgcattcatacccattaatgctctaaattatgtcatcttgaaatttaaatatcattatataggatgatacatattgaacaaagagccaaggtatccttaaatgtatggctggtgatagaggcttgtctatactgtcatggatgtttcttatcagatatttgtgaagggtattaagctaaacttgccttactgctttttaataccttcttttgcaaaatgtaatgtatgcaaagtaaacgtgttacttactttccatactctatggcacaggatgaagtcaaccggctatcagatcttcaacctcaaattgaacgattaaaaattcaaagcatagccctgaaagagaaaggacaaggacccatgttcctggatgcagactttgtggcctttacaaatcattttaagcaagtcttttctgatgtgcaggccagagagaaagagctacagacaagtaagtaaaaagcctaaaatggctaacttgacattttccaaaatggttatttgtggggaaatccagaaggtactaacatgaaacaataatttctgtaaatggaaccattctccctacaacctgtattaacaaggaacgaaatactggtgtaacagataagctgtctgtagatttttttgtcctcataataattttgtgactttgagaaacaaaacatgttttgtatgggaatagcttctccttgggggattgtagatttcaaaatcagatgttttgaatatagaagaaaataaaagagcagttgaggtcatatgaatacacttcaattaagtctggctcgctgtatatacaaggatatttgctaggcatcttctaatatttctgtcaatttatctgaagagtattatagctttagcatacatgtggcaactgaaactcagcaaaggacaaattattctttgggctacattttactactggatcactataattacataaatcctattttttcctttgatgataaaagataaaagtggagcaattatgcaaattcatgccatgcgactagcaaatttttcaagatgtttcttttgtctcttcctgaattgctttaataagatgatgttaatacatagtatctgctccaaaatatctctactcatcaacttagttttaagacaaaaattcttttcagagacagatgaatgaccacctttaagaaatagtaaatggggttttgattcactatatacatgcatatatgtgttcatgtgcacacaaaaggaattattgagtaaaatcgggtttgaaggcattaagataaaagtatttttctgaaaaaatctctgtcccaaatttgtcatgagaagcacaggaacatgtgtttgtttactactaaaacttaaattagttggaaaatatattatcctattgcttttctttgtaaatatttaaagaattcaccatataatatcatttccagaattaatgtagtgatacacaacgcttttctcatttcccagcttttcattttttacaaaaatgaaatgagctaaataaagcaaaggataaatactttttttttttttttttttttttgtacttcagagtcgtttttgctaaggggtttattttcctgtacaggtagtaaaactttataaatagtatcagctccctctagtggatttcagtatacttgttactgtgcctctgcaaaatcaatttgggaaaatattttaaatgtcctagattttcaaatattgacatatttaacaataatgtattttcacttgtcattacatacataactcccccttaaagttaaatacatttagtggctatgcagcaattgttgtgcaaaggagccatttcactggaaatttactttaatctgtatatacctcttaatcatattaaagttcaactttttatcatttactttaaagatgttcagaatagcaatgtttgataactgagatttgtctatgatgttacaatataaatacgtaataatatatagtctctattcatacagctctccatccatccatccatccctatcatctttcttctcttttttaaatttcatacctacaaacgatgattgtttataaaacttcctaactttttcactgctattatatgtaaacaaattgtccccacttccactgtagctacacatctttaattttactattcacccttttggaatgcttgtctagattaataaataaccctttaattaaatatggtgtatatatatatatatatatggaatgaaaaatgtagcatatgaaattacatagcagttgattttgttaatttgaaattaattcaaataattgcacatgtgtatgcattatatccgaactggcaccagggagtaaatctcatttcttgtattcctccacagtactttggacgtattaagtatgcaggaaataagagctaacagaagtgcctaggcatccatactgacttttatttcctctttacttttttaaacttgctttttcacacaaaaacctggcttttaaaatatactatcagtgttggaaaatggcataaggaattggtagttgttacctgacataagtgatagaagaaaataatataaaaagataaaattctattttcaaagcactttttactctatgcataactaatttatacatcattttacctaaccctcagagagaaacacattgagtatttgttattacaactatatcacaagtaagctaatggggtttgaataactaaaagcatggatatgggatgctgtaagaactagatcgtatacacgaatgtccataacaacattattcataatagccaaaacgtagaagaaacccacatgtccatccagtgatgactatatgaagaaaatgggcacatccatacaaggcagtgttactgagcaataaaaagggagaaagtactgatacatgctacagcatggagtacccttgaagacattatgctgagtgaaagaagccagtcacaaaagatcatatgttatatgagtctcttgatataaaatggccacaataggcaaatctgtacaggcagaaataagattagtggttgcctaggtctgggaggatgagggggtggaattgtttcccatgacagttgataaaatacttttctagagactgaaaaccagtaaactcatgttatatgctagatgaatatagaaacacagcatctagtctgttgtagataattgtttcaacaaagaaaaaaatgaaaccttatttcttaatgtaaagaaggaaaaagattggtcatataatttgagtttatttcattaacaatttggaaatcatgttaaaataattattagggattttattggtttggtttagttttgcaaaaatggagaaagtgacattattagttatgacaaagccagtgttttgactgttctaaagtttcaaaatgattctcttctgttctacaccattagattgctttcagaacagagtcttgctcactttttcactaataaattcaagaaatatttttgaacacctggtatatgccgtaaaagtgctgggcactaggtaatatacatggtggagaaaatcaagagcaatatgtcttcatggagcttattgaaagaaagataataaaattgaatatctgaatattattgcagattataattactttggcgtctgaaaccgtgattctggggagatgatgttagaaccaaacctggagaatgtgcaggtgccagctatatgataagttggagaaaggacattaggagaaatgaaaagaaacacaaattgccaaaggtgaagaatgagggcttggcatgtccagaagacataagggaggccagaaaggctggaatgtaacaaatcaatgaaagattaggacaagatgagggtagaattgctcttatagaacttctataacaggtttggattttaagagcagtagacatttccgaaagaatttcaattgaggaaattaagtacccttagttgtattttttcaaaactcaccctctagctggtatgtgaagaagaaatgcaatacaagtctgaggagaagcaggaagacttgtggaaagaatagccacacagaggagagtccattgaaccttaaactacagttgtgataagataaagaaaaatcatttcaacccttgaagaggtgatgatctggggaggtgtagcacagaagatattcttgccagaattgaaagaaaataacttttacctcttacagagacagtagaagaaaattttaagggtagccagcaaggatgctctccatggccacaatttcaagctctatggttagtctctacccctccctgttaggatgctgagactgggaattaaaacaaagtttgatgtgaggtaactcttctagctgcagttcaggaaattgacctaatttactttattaaaattttaaattttttattttaaaattttatttttaatacatctaggcaaaggaatgttttgttccagtagacacataatctgttgcattgctccttcactccagaaactaggtaaactgtttgtaaatgttccttttaaaaattgtgttatttttatcaataccatcaagagcaagcatagcagacatgtttatttaagcaagctatgtgcttattgtgagataaaagaattgttccctgacctcaagaatcatgggaaaactcgctaaatgccaagttaaagctatacatatatatatacacacgctgtgtgtacatatacgtatatgtacacaagttgtgtgtgcatatacgtatgtacatatatacacatactgtgtatgtacacacacagacacatactgtgtaaatactcacgtaggcaaatattgtgtatatacacacgtagacacatactgtgtatatacacacgtagacacattctgtgtatataaacacgtagacacatactgtgtatgtacacacgtagacacatactgtgtatgtacacacatagacacatactgtgtatatacacatgtagacatatacacacacacacacacacacacacacatttataaaatttatgtgacaggaacctcatactattttccaaaatggctgtactaatttacattcccaccaacaatgtgtaagtgtacttttctccacagcctctccaacatttatctttcatcattttgaaagtagccgttctaattttaacatgtgtaaggtgacacatcattgtggttttcacatttttctgatgtttagagatgttgagcattttttcacatatctgttggccattggtgcctcttattgcgagaaatgtctgttcatatcccttgcccatttttaaatcaggttatttgttttcttgctgttgagttttttgaggtttctatatattttggatattaactccttaccagatatttggtttgcaaatattttctcttgatctgtgagctgcctcttcactctgttaatagtttcctttcctgtgcaggagctttttagtttgatgcaatctaatttgtctatttttgcttttgttgcccatgccatatccatttgagcattattcataacagccaagatacggaaacaacctaaatgtctattacaggacgaatggataaagaaaatgtgatatatatagtgatatatgcatagtggtagatatatatagtgatttatatatactgatatatagagatatatatactgatatatatagtgacatatatatatagtgataaatatattccagtgtctatatatgatatatatatgcaatggaatactatacagtctttaaaaggaaggaatttctgtcatttgccaccatgtagatagaactggcggacattaggctagctgaaatgagccaggcaaagaaagacaaatactgtatgatctcacttatatgagaaatccaaaaaaaagtcaaattatagaaacagaaaatagaaaggtagttaccagagactggggggaagaggaaggttgggaaagggaaggtgttgatcaaatgatagaaagtttcagttagactggaggaataaattgtagcgatctctagtactgcgtggtggacacagttaataaaaatctatgtttcaaaattggtaaaagaatagattttaatatccgcatcacaaaaaaagataagttggtgaggtgattaatatgttaattaacctgagtgaatattttacaatgcatacatagatcaaaacatcacatgataccccataaatacacataattattatttgttagttaaatatgaaatagtttaacatgatattttgaaaataggattgctaagtggatagagctgcttttagaaaaagggaaaattcagcaaaagaaaaaaactcttaaattctaataaatatttctgtagtgtggtagtttatacttacacaaagttggtcagaaaaatgagacttacctggaaaataaatcagttgtccaggaggtgaataatagagcagtatttatgaaaatgaccccaatttcagttggttcattggagttttatgacttataaaacaaattctatggtgatcttagataaaattcctataaacccatctatttcactcatgtcagaccacaccaagtgccctttgtgagaatggagcctgagcagcagcgactttcagcagagcaagttgcataagcaaaaaggcgtgaagtaattaaaaggcatattttgactggaggatagaatattgattttgataggaaattgggctaaaatgttgattgaattcccaatcacaaagatccttgtatttcaaactaaggaaacaacttatatattgacattagaaattcaagttatactcagacttccttgcacttgtaattatctgaaggaccattcctagtatgttaatcatcatatatcatgcatgggtcctgttgtatttcttgacacctttgtcagtgttcacattttagagaaatgcttacttttgtcatggtctatgttatttaataaagtttggagcctttgctgattgcattatctccttgactttagattgatcatggggaatgaggaaaaaggtgggatctggttggcatggaattaaaggctcaagttgagcattttgccgaagtaggtatatgtcattagttcagcttcttcacacatgtgcagtgcatttttttccccacaggtaataatggggaattcaaattggactcgatttcatattcacaacaggacttctaatgtttttaaatgctgtcaatattaagactactaacatatcatctctttctccccctaaatggattacatgggtgccttttccagcttctatctaagcactatccaacagaaaaataatgtgagccatatatttaattttaaatgttctagaaaccacattaacagatcaacaggtaaaagtcatttgaaaatattgtttcatcttagaattaaaattttaaaatgtggaaatagctttacattctttttgtatgaactgtccaatatctggtgtgtctttatatatacaaaacatctcaactcaaactggccacgtttcaagtgcttaacggacgggtagccagttgctaccttattggttggcacagttacgtcttccttctctctattgtacattctctgatgcttaagtgcctattttctgagtagttctatttttcaagaggagagattttttttttcagtaaagtgttatatataaccgattgctctggtatctctttatctcgatagttatgtctctcagaattttcaatatacttctctgtttactttgctttccagttaaagtggtttgcccttgacatagactcatgtgtattagaaaatgtagcatctaatttcatacttagctcttttgttatcacaaaagaatcttgctttgcctctcttggtctgtcctttgctctccttttttctctcttcttttccctttagcccctccctcttttaagagttaaagacaagcagtttttaaacaaaaggtgcagaaaacttcttttttgtattcctttactataattttagatgtcagtttgcctatactttatcacttccatccctcacatggctatattaaatgtctagatattaatggaatttttttttttacttttcaagataaacagtagtgcaggataggagcccttaatttttattttcccaataatttacagcacgtgcttccaagcttgcaatcacttatattgattttcattttgttgaatatatttcactaataaaaccaaaaagatatctgcatttttaaagtggtcctttagcagccgaatagtagaaactgtcataggaatactttctttagagaaaaaagttacatatttataagcaatatattggctaaacgttaaatcttcaggccatatttttcctgagtctgtgctgagtctaatgatgtcagtagaactctcgaggtcttttaagatggtaggttattagattggatatgtttattgtcttattgctgtcagtaaagataaacttatctgttggattattaatctctatttctacataaaaggaaaaaaagtgagtttccgtagatggagctggtctatttctgctcctatgttgggatcacaagggcagcatctacagatatctcaccagctagtaggtggggcagctcatactgtgtttgcccttgggtacattagcttctgtataagactttttctttcttcttatctgaaacagatttagaattcttcactggcattccctggcctgcatggtttaaatgagatactctataccgttgcaaatttgtcaagcatttcctgaaccttgatagcaattactgctgtcattacatagtgtcattacattccacataagaaaatcagaaaaagaaattgtgatatttatgttagtaggtgtgtatttttttttccagcttgcctcacaaactatattagatggacaagttcccaaaccaatctttggaagtttatttcttaaagctacaaaagaatttccaagagattagattttttgaaatgaccagtttcaaatgaatttaatacaaaactaggatgagggttggaatgcaaggaggaattaaaatatgcatgttttaattatagtttaccaatatgaagtgattcctgtgagattcagttgttggacagatcagaagttatacagaaaaagatcaataattcagagactgaagtgtttcagttttcattaaacagaaagaccagaaagaagttaaagaggagacatgttcaagttcaattaaaccaaattttatgaagcttatgattcatccaacataccgccatgtgtctgcccatagtcccctctccttctagatcatttgctgaaatgacatctcagacacaatcatttgcttcattgtaactaaatacctctttacttcactgctatttataaggtcccttttggattttgtttattaataatcatctagaattcaaataaatgcatatgccactcttgccactcctcttcagcatagtactagaagtcctagccagagcagtcagacaagagaaagaaataaagggcatccaaatcggtaaagaggaagtcaaactgtcagtgtttgccgactatatgatcatttaccttcaaaaccctaaggattcctccagaaagtttctagaactgataaaataattcagcaacatttccagatacaagattaatgtacaaaaatcagtagctcttctgtataccaacaacgaccaagcagagaatcaaattaagaactcaaccccttttacaatagctgcaaaaaataaaataaaataacaacaacaacaacaaaaaacttaggaatatacctaaccaaggagtcgaaagacctctccaaggaaaactaccaaacactgctgaaagaaatcatagatgacacaaacaaatgaaaacacatcccatagtcgtggatgggtacaatcagtattgtgaaaatgaccatactgccaaaggcaatctacaaattcagtgcaatccccatcaaaataacagcatcattcttcacagaattagaaaaaaaattctaaaattaatatggaaccaaaaaggagcctgcacagccaaagcaagactaagcaaaaagaacaaatctggaggcatcacactacctgatttcaaactatactataaggccatagtcaccaaaacagcatggtactggtataaatataggcacatagaccaacagaacagaatagagaacccagaaataaaccaaaatacttacacaaactgatcttcaacaaagcaaacaaaaacatacagtaaagaaaggacacccttttcatcaaatggtgctgggataattggctagccacatgtgggagactgaaattggctcctcatctctcacattatacaaaaaccaactaaagatggtttaaagacttaaacctaagacctgaaactataaaaattctagaagataacattggaaaaaactttctagacattggcttaggcaaggatttcatgaccaggaacccaaaagcaaatgtaataaaaacaaagataaatagctggtacctaatttaaattaaaaagcttttgcacagcaaaaggaacaatcagcacagcaaacaggcaacccatggagtgggataaaatcttcacaatctatacatctgacaaaggactaatatccagaatctacaacaaactcaaatcagtaagaaaaatacaatcccatcaaaaagtgggctaaggacatgaatagacagttctcaaaaggagatatacaaatggtcaacaaacttatgaaaaaatgctaacattatgaatgatcagggaaatgcaaatcaaaaccaccatgtgataccaccttactcttgcaagaatgaccataatcaaaaaaattttaaaaagtacatgtttgcgtggatgtggtgatcaggtaacacttctacactgctgatggggatttaaacaagtacagccactatggaaaagagtgtggagattccttaactaaaagtagaactaccactcgatccagcaatcccattactgggtatctacccagaggaaaaaaagtcattattcaaaaaagatacttgcacatgcatgtttatagcagcacagttcacaccagcacaatcgtggaaccaatccaaatgcccatcactgaatgagtggttaaagaaactgtggtgagtgtgtgtgtgtgtgtgtgtgtgtgtgtatgtatgtatgtatatatgatggaatactactcagtcataaaaatgaatgaattaacagcatttgcagtgacctgaatgagattggagactattattctaagtgaagtaactcaggaatggaaaaccaaacattgtatgttctcactgatatgtgggagataatctatgaggacacacaggcattagaatgatataatggactttgggaacttgtggggaaggttggggggagagagaaaagactacaaatagggtacagtgtatactgcttaggtgatgggtgcaccaaaatctcacaaatcaccactaaagaacttactcatgtaaccaaataccacctttacccccaataacttatggaaaaataaaaaataaatgcatcaggttaatagagaaacatattatttatgtaaattaaaacagattttaagtactacaaatatcttttaataagaaatcagaagtgctcagattaaatataatctcttaacatttttatgagttcccaaataaatgcaatataaacatattgaaaaaaattatccatttctaacatttcagcatccattgccaacacactctctaagattatcgcaaccatctgaatactacattaaatacatgcaaaatactttcctatattcttctcatttagtgtagaaggaattggtatattgaaatgacattcatatcccagcaattaaaataatatgatttagataatgttatttgatgtggtgatataaaccaggactttgcagtgtgatttcatgtatttagaaacattattagccattatctgtttaaatatggcttctgccacattctgggatgcatatatattagaccgttttactgtgttctctatctttttgtgtctccatgcttcattccaggtatttccttctgaatcttaagatttagtaattttctatttacccctgtcaaatttgctgttaaacccatgcacttaattcttatttttcacttactgtatttttaattctagaatttcttttggattatccctaaaatatgttatgtcctttttatggtttacagttctctgcagcgttctcaatcttgtgtctaatctctttcaatatagtccatgtggctgcttaagtcacatttcatatatatacatatacacatacatactttaaaacgtataaacttgtttgtatatacatactgtatatctctatataatactttccctaatataattatacatataaaagtatatacatacacatatgcctctttaatagcctgttttctcaattgcaattgggattaacaatgtatatgtctcacaggtttattataagaattaagaatgataatatttatggggttattactagagttcttgatacatatactaagcatgcgtacatgggtgttctttcagtaaaattagacatgacatgatataatttaaaaatcaaggtcttcggataatgatactattttttttccaaggcaaatgataacactgagagagagtagcctttcagtatcagatacaattggaccctgctcggtttctgcaaataccatctgtatcaccttgggcaatttacttagcttctctgtttttctgtttcctgcccttatctgtttttctgtttcctgaccttataaaacgaattgaacaatatagattttacaggctgatttgtgaatttaatgtaatatgtgtaaggtccctggcatattacacatgtagcaggaatgtatcttcataatcatattaaatatatttttcagattttctaattttgttaatatttgaaactagtaatataattgagtttgctgacaatttaggaaaacatggcaaagtgtgaaacaattaagtgattctcattcttttttcccttttgataaagtttttgacactttgccaccaatgcgctatcaggagaccatgagtgccatcaggacatgggtccagcagtcagaaaccaaactctccatacctcaacttagtgtcaccgactatgaaatcatggagcagagactcggggaattgcaggtctgtgaatatttgaatgtcaaaacaataaagcacgcttatcaagcattcacattgatataacctttaaataatattagaatttaagtcattctgacaagtatggtagtttgcccattgagcaaatgaaaatgagactttacagtattatttatgcatatactctatctatggatatatatgtatgggcatatatacatgctgtttttgaaaacaattgtatgatctatttatgaagtatatttttaatttagcatgcattttcagatgtattgattttgattattagaaaaaccattgttttattccccacctttgcttctttatttgtaactcctgtcacattctcaaactggtgggtaaaatcagtgtacagtcatcccttcgtatccatggggaagtggttccaggaactcctatgaatatcagaattcacagatgttcaagtcctttatatgaatggtgtaatatttgcatataacttatgaacatgctcccatatactttaactcatctctggattacttataatgcctaatacaatgtaaatattatgaaaatatgtgttatactgtattatttaggaagtagtgacaatgaaaaagtcttacatgtttagtacagatgtagttatttttgtcaaatattatctattagtagttgactgaatccactcattcagaatccacaaatatggagggctggctatatttataaaattggtttaaatttaaacattaattttctgtaatgtaatgagacatttgaattctaatagctacatttttttaacatccttctatcaggaaagatatactaatatgggaaatgaaagaaataatttgtaagagattttataatacttttcctactttattttatttttagacggagtttcattcttgttgcccaggctggagtgcagcagtgctatctcggctcactgcaacctacgcctcccgggttcaagtgattctcctgccttagcctcctgagtagctgggattatagtgcgtgccatcacgcctggctaatttttgtatttttaaagtaaagatggggtttcaccatcttggccatgctggtctcaaactcctgacctcagatgatctgcctgcctcagcctcccaaagtgctgggattacaggtgtgagccactgcgcccagcccttttcctacttattataaaatactacattatatgttcaataactttttatttctgaagacatgaaaacgtattagttatatttagaagctgagataatatgtgcattttaagaaaaatgtttaaaaattcaaatttaaactttatcacatagaattttttttggataattaaatatttttttgaagtaatgtattcaaagaaaaatacatttaaacaactttcattatgtattgtcctatttagatatttattctactacaataccaaatggtagctgtttcaccttttttgtttccttttgttgtggtttttaatgcttggcataatgattccaaagtctatctggaaaaatgtgttgcctaatagaactagtaaacttttaaacataagaataaaaatgtgcaagaataagagtggagaaaacacaagaaaaggcagttagatgagcagaagagactatttccactgaaaaagataggaaagaaaataattgttcataaatattattgggaaatgtattaactaactaaaaaaaaagatatgaacatttcccccaaagttacaccaaaataaaaaccacatacaataaaatgttcaaaaaatgtggggaagcccaaattttggaaaatatttaaaataataatgttataaaaatttaggtggagaagcataaaaatcgatggaaacaatcacaaacattgtaaaaacaccagagacaattttaaagaaatatgataccaaggaatctttttttttctgtgagtaaggaagaaagtcttgagtaaggtatcctccaaaaagagacatatatgaataataaacctatgaataattgtaacttaaattgtaaaggaagaagtaaaaaaattacaagatgagaattttttttgcatactaaattgcatacacacaaaagatataagtaccaatttgcaagtggtgaaataaaaattgtctcttactgctggaaatgtaaattcaatatgaattttactgaggttaactcttcagtgcatcctaataacatacaacattaatataatttccatgaaatctgtatctgatggaaataatcagaatacactcaaagatgtaaatggaactggagatagataggatattgattgattgagggatggatggatggattagataggtaggtagatagagataaacataatttacaggagtggaaaactagaaatgaatgtgtagaactaataatggaaattgttgaactagaaaagccattacaatttttgtttttgaaaaaataattatttgacatgggcaaatgctcacactaaaacacctagctcaaagtgtagttatatgctagatattgtctaaataatcagtcataggggaacaatttgaaaaagtgaaataaacttaaaaaagtaaagtaaaaaaacaaattaagtaccaccaaataggcataggatactatgaaactataaaacttagatatttgacaaattttgggttgatataggtcacattataggggaaagaataactgtttatatgtgcatacatgatcatatatttaatatttagctatacatagaacaaattgaaaatttatataaagtactagtagttctggtttttttttccatttttgtcatgagcctttattattttataaagtaaaagtaacattaaagtaaatattgaacaggggaagtctaaagttatgatcctactgtaagaaattacatgtgttatacagaataagtataaataaattttataaattctccacaaaactatccttgaatcccaccataatactacataacagaataacattttttgaaaatatattaagtacatagattgttcaataagtttttctattccatatatcaatattattagctatagttttatgtagagtttactttcctgaaagctcagtataattaatttcaactccattaactgtatcacaaatgcagttattaatatatatacttaattcagtaaaattagatgcaccaaaactttttggctctgtaagatatagttttgagatatatttgacattgttcagaaaaatacatatggagtgttaaataccactaaataatattcaagttactcttaggataatatgtaaaatttaaattaccactagaagtttataactgatagaagatcatctactttgtttacatgtttgaatcatatagatttcaagtacagttaatttcactaaaactcatcaattattattcatcaattagggtaaatgtatttaaaaaattgttttttaggctttacaaagttctctgcaagagcaacaaagtggcctatactatctcagcaccactgtgaaagagatgtcgaagaaagcgccctctgaaattagccggaaatatcaatcagaatttgaagaaattgagggacgctggaagaagctctcctcccagctggttgagcattgtcaaaagctagaggagcaaatgaataaactccgaaaaattcaggtaattcaagattttactttctaccctcatttttatttacttgttttttccctaacgatacactgtaaactgtaaaggtacataagcatttgaccttcagcatctttcaaagttagtgagaagatgaaaagacatgagtcttttacaaaggatggcgatttgcttattccttctaggaaaagaataggagttttctcagtgtttttagaatgaattttctattttcaccattaccaataggaattaaacatgtttttagtttaataattttcaaaaccaatcatccatttagtctggttgtcttttaagatacgggtaatcatttagcttatgactagaaaaaagttatgtatatatacattatacagaggtatattgtaatcattttatatatataatgtatagtatgtatatgattatttcctatattacctttcatttctgctgttttgctacttataaaaagtaggagtcaactatgctgtctatatgtgctattatatataaaatatggtgatatgttcataaaattgcattatatattcatcccattatgtataactccatatatgtatatgtgcagtagaaatgtaggtgtattaatgtcctatgatactcctaagaaattagcagaaatttaatggcttcaaacaacacaaatttattacattactgttctggaggtcagaagttcagaattaatctctgtgggctaaaattaaggtgttagcagaactgtgtctgttttggagactttgaaagagaatgtgtgttattggcatttttagcttccatatatatatgtatatatatacacacacatacatataacatgtatatatgtgtgtatatatatatatatatacgtgtataatggaattatatatcatgtacatatatacatatctaatgtaatatatatcacatatgtaacctgttgtatatgtatattaatgttacatatgtaatatatagtaataacttattttatcaccatatcgaatttgtaattatatgcttaaattttaccacatcaccttcttcctgaaaccaaattcccttgacttaatttgtttgaatagtgccaccatactaataaccactcaagctaaagaaaaacagtaaaccaacaattgcattaaggtctaaaagcctaaaatattcaataaggtaagtaatgtgtcccttgagtggtcaattattgtgacaaatgttaatgctgggaaggaaatgtcgaaaacgttatggtatgatggaaaaacattgcaacaatatgctcctggatttaaatcccagtctagctgcttagtttttgtgcttaccttttacaaaccaaagcactaagcaaacctaaaacattttttaatgcatagcatttctttacttataaacatatgtgtacatgcatacctatgtaaatactgcatgaaaatatctattatttgtcaagaccagtggcctaagagggcacaattacatggctcttgttatcaaggagcccacattctagtgaaggaggaaggtaggtgtattcatttcctatggcactcctaacaaattgccggaaatttaataacttcaagcaacacaaatttattagagttctggaagtcaaaagttcaggattagtctcagtgggctaaaattaaggtgtcagcaggactttgtctgttttggaggctttgcgacagagtctgttttattggcatttttagcttctagaagcattccttgtctcatgtccccatcctccatcttcaaagtcagcagtgtaacatcatctagtgtcaatttctctctccctgtctatctccctctccctctctttctacctctccttctcaccttcctttccctatcctgttccctgtgttgacttccttttaattaggacctttgtgattacattatgccctggtggatgatccagtataatctccccatctcagaatccttaatgtaatcacatctgcaaagtcctttctggtaatatactcacaggtttcagagattagggtgaggacatcttgggggtagcattattcagccttgcatggtaaataaattaaacagtatgggaaaggttgtcacagtaggcaggaaggaaatccaacataaactaggaaaaaggattatgaaatattatcggaacataggttgtctctgctatagattaaataggtagaatttagttagctaataccgagaaagaaagagttcttgagaaagcatagcagcattttcagttaaatgatataagttcaacactgggtagacaatatatatggggattaataaaatattatggttggaaaactggattgagagtagacagtgaatgtccttggatgctatgttttacaatctgagttttaatctagtggtgatgggactgataataataacaataaaaacttaataagaaaaaactgctattggttaaagagggaaataatatgattccacttgtgttttcaaaacattcccaagatgagaggaaggaggagaggagattactggcatcactgtagatcagtaattagaatgaggtgagaccgaggcagatatcaaaacgagccagtgcattaatggagtcactaatgagacctgaacagcccaggcgtagtggctcatgcctataatcccagcactctgggcagctgaggcaggtagatcacgaggtcaagagatcaagaccatgctggccaacatggcgaaaccctgtctctactaaaaacacaaaaattagctgggcatggtagtgcacgcctgtaatcccagctacttgggaggctgaggcaggagaatggcgtgaacctgggaggtggaggctgcagtgagccaagattgtgccacttcactccagcctgggcgacagagcaagactccatctcaaaaaaaaaaaaaaaaaaaaacaaaaaacaaacaaaaaaaaaaagacctgaacaaggacagtgaagatgtgaaataagaacaaatgtagacttgaaagataacagcaaggtgatcgtcttgaagttctcttagataaatagtttaaaaattattattaataatcacattaaaggggaaactttctgtggagcacatattttcaatgtaaatttaagtaaaacagaagaaaataacacatgtagacagcatagttgaatcatactttttagaagtggcaaaacagcagaaaaaaaggtaatacgggaaagaatcatgggtgagagatactggctatttataaatgataaaagatgatgatttttacctgatcattacttcgtactggtcagacaaataaaagcaaaagctctgtctttgaagatgacaaaatattagtccaaaagttcccaactggaaggactatttaaactgtcatctgtagaaaataatttgtgaaagttcgggtttagggaggctataaagacaccattacattgagtttattgttcatagtttgttttatgtactgtaaggacacatttttagtattctcatgagttgttttgtaacttaaaatttctctagagggggatatgatttaatgttctcgagagtaacatcataaaaccacatttggtagtaattttgtatttttaacaatagcagacttcacacaccagtgctcatacagtagaccataaaaatgcagtcttagtaaaaatattctttgcctcaagaactacttagagacatcctttaaacatgggaattgtttttgggcctgtgtttagacataacacaatgatgaattgtgttaaaagtaatcagcacaccagtaatgccttataacgggtctcgtttcagaatcacatacaaaccctgaagaaatggatggctgaagttgatgtttttctgaaggaggaatggcctgcccttggggattcagaaattctaaaaaagcagctgaaacagtgcagagtaagatttttatatgatgcctttaatatgaataattttgtatgaatattatttggttagatcagtgttttacagctggggtggattttgctctcctctccccagtggattttttttaatgtttctagacgtttttgattgtcacagctgggttgggggtggtggttagatgctactggtgtctaataggtagaggagagagatgctgctaaatatcgtacagtccatagaacattcctccagaacaaggaactgcacaatctaaaatgtcactagtgccaatgttgagaaaccctgggttgagtaaatgaggaactgacaaaacattgccttgtactcaacctcatttgataacattattttactataaaatgcagtataatttaaaggtaaagaatcctttgagctacttgttatttcttatgataaattactattcatactgtgttgttctcttcatctataatgcactgtactataatataacacagtatgcattttgaaataatattcattataccattgtcatgcagcaggaagaaaacaatcttgctctttaaggaaatttttttacaatacaagctaaaaaagcaaatccacctcacaaataaccttcacacccattacactgtaaacaatttctgcagtatcctgtgtttgaaaatgaaaatactaacaaagataataaagtatgaagcccatcattttcacacatttttctaaccagaaatattaaatttatttccttttgtttctgatataagtagaatacaaataattccccactggattcatgccataataaccattgaacatttttgcaagactgttaggcagtcatctatatcaatatctctgtatctcagattttaaaagacaaaaatccatatgcaatgccatcagtcccaattttacattttctagctatgtttcatatctaatatgtggcagtaatttttttcagctggcttaaattgatttattttcttagcttttagtcagtgatattcagacaattcagcccagtctaaacagtgtcaatgaaggtgggcagaagataaagaatgaagcagagccagagtttgcttcgagacttgagacagaactcaaagaacttaacactcagtgggatcacatgtgccaacaggtatagacaatctctttcactgtggcttgcctcaacgtacttaactaagatttcctaatgtctcccttcaccgttacttttggttaaggctttgttcctatgtttttgctttaaagcacaattaattctgacaaattaatcttttttctagcatatctaaatattttcatggtatatattttaaatagtacacattcatcttattttgatcctaaaatgactttcttgaacacaactgtcatactaaaaaatgaaatcctattcttagtcattatttccaatccatgttttcttcagaacataaatgtataataataatgggattaagaaaaatttgttacacggagatatttggtacaaaataaaatgcatggctaatatatgtgtatgtagaaataggataaataattataactttcgattaacatttccaagtttggcctcttcgacacatttattatttatttattttattttttgggacagggtctccctctgtcacccaggctggagtgcagtggtgtgaactcggctcactgcagcctcaacctcctgggctcaagcaattctcccatctcagtccccacaagtagctagaagtacaggtgtgtgccaccatgcctggctaattttttgttattttttggtagagacagggtcttgctgtgtttcccaggctggttttgaattcctgggctcaaacaatgctctttccttggcctcccaaaatgctggaattataggtgtgagttaccacacctggctgacatctagttttaaataacaattaagattcagtaaccattaagaatagctgaatttcaaaaaaaaacacacacaaaatgactgtacactcatatttgagtttctcatttttctacagaagaatattttatagatatctctcttatatttaaatattcaattacggatagtaagatatattcaaaaatagtgtatatcaaatacttcttgttcgaaagataaaattttgaactaaagcaatgaatacttttaagttcaccaatacattagtccccgatcatctgcagttttgctttccctggtttcaaatgcttgtggtcaattggaatcctaaaatcggtgagcacagtaaaataagatattttgagagggagaagaagagagataacttgttctattttattagttgttaatctcttactatgcctaatttataaattaaattttataggtatgtatgagtaggaaaaaatctagtgtatatagggttaggtatcatctatggtttcaggcatctattggaggtcttggtatgaacatatcttccaaagatacaagggaactactgtacctttttggaaattaataaggggtttcaatttacgtgttagaggcagttggtctttggttactgctaagtaaactttcaaaatagaaaagaagtaatgtcaaaaggcaaaagctacatttgaaaatgaaaaaaaaaattagaaaagtcaagggaaatcactcagctaatacaatcactgacaagtgttcattggttctgttaattcacagatgagctgtccctgggtcagctagctcacattcttctcctgaagtaagtcagtgctagaagagttgtttaggaaaaaaaaaaaatattacttaaataatagattataccattgatgttttcctggaaggccagtgtgaaaggtatttgttttttgtttgttgaatgttcttaatggatgaataaaaagaacatcaccaatttatgtagagcaaggggaaaacatcagccaaaaaaaaaaagtataaaaccaacaatattactaaaacctcaaggtttttacattttacaggagtacaatttgtaaaggctctctaaaaatgtctttgcttaagaccttatgtctgttatatgtactaagaatttgttgttcaagagatatattttaaacacactcatctgttgcatagcaaaaaagctatagatccaagctatgttctgatctccattttctaatcttagaatattatatgtatctgtgcttttcctacaagtatcactctggccatgttctgactttgtagccaaatgagttaggttgtaaaaggaaggaacaatggcgctcaaggagaagaagaagacgatgcggtaaaaacaaggaagccatatgtgaatattgttaccaattcagcattccagagagaataatggaaatgaagtgtaaatctatgcattacagaaatatctacagacaaaataagtgtgtgatacactcttttgggttaaagataattccttttttgtcaccagatgccaatgtctgcgaaaacataaataatttgaaacaaaattgtccaaatatctgatacatttgaagatgctttcacatcccatgatctaattttgggtatataaaatggttattattttaaattttaaagggtatgtatataagtttaaaaatctagattctagctatttctaaaaaaatgatcagatataagtgagggaataaaatagacattgtagttaccttcacggagataatagtttagtggtgaaaatggaaagtaaataggttaacacattatcacaacaatgtcttgtttgaagtcttgcttacactctgaatgtagcaataagaaccctttaaatgagagtgacaggagcaggaaaactactttctattgggtagtcagtagagtgttttctgaagaggcgaaattaaagctgatacccgagtagtaggaacttgacaatttgttgtgtcaaggaattctgccagaaaatgaagtggagaaaacatctgaggcaagagagggcttagcatgtttgaggagctcaaaggaagccaggagaaaaagagtgggaaaatgagtcagaaaggaatatggaagccacagtgatgatttagtcattatgtcaagtactttggaaagtcatctgacttttaagcataggagtggcatcatttcatttcatttaaaatggttgttttaagtttgctgcatattcctattagaagaagaataaatcaaaagggctgaagtggaagcaggtagggattgcaattgtccaggtagaaaaaaaaaacaggcaggaaaaaggggatatttgtggatattgtagttttctgaggaacctccatgctgttctctacagtgactgtaccatttatattcccactaacagtgtagtgtagttcctttttatctgcatccgtgccaacaattattttttgtctttttggcaatatacatcctagctggggtgaggtgatacctcattgtggttttggtttgcatttatttgatgattaccgatgtggaatttttttttcatatattaattggccatttttttcttcttttggaaataactgttcagattatttgcccatttttgaatcccatcacatccacatatgatatgatgttttatatcataaaatcgttatttttctttttatgatatctgagtttctagcttctgcacagcaaaggaaacagtaaacagaatgaaaagacaatccacagaatgggaaaaaatatttgcaaactactcatccaacagaggattagtatcctcattacatttttgatgaggactttcacacttacatctacccagaagtattattcctatcctaacatgacacattcctttattctttttaacagatcccattagatctggcagtacttgctgaaggagagtgtttgttgatagtctagaggaagaatgagggaagaatcaaagtgttttcagatatatttctgttatgagctacattgtaggtcattgtgattttaaagaaagagtgggtactaagagaagaacaaaatggaatagcttactagagtgactagcggttccatcttagccatatttatttcggagaaaaagacaatcagacatgtatctggaagtcaagtacacttttcaaactgggcatataaacgaggtacataaaaataaagataacatgtatataagatactgtttcttgcctattgagaagatttccccatgctcccatccctaaaatgcttggtcaaattggataattcgtaaactcttagagatggaagagaatctatttttgtttaaaccactttgttgaggtatgactgacataccaaaagctgtacatatttaatttatacaacttgattagtttggggataagcgtatacccatgagacttattaccacattcaagatgataaacttacctatcacctccaaaagtttccttctgccccttaatttatttattttttttgttttgtgataagagctcctaagatctatcctcttggaatatttttaacaatacagtatttttaactataggcccaatgttgtacagtagatctgcagagctaattcatcttgcataactgaagctttgtatcctttgggcatcattttgccattttcccctctctcagcctttggaaaccactattctactctctagttctgtgagtttgactattttagattctagggaatggaaggaaatattcacaaatcatatgtctggcaaatgattaatatccaaaatatataaggaacttctaaaattcaatagcaaaaataaaactgaaaaataacctgattaaaaatgagcacaggacttgaatagtcatttctctaaagaatacgtagaaatgaccaacaggtatatgaaaaggtgcatcactaatcatctgaaaaatgcagttaaaagccacaagaacctcttcatacctgttagggtggctattatcagaacaaaacaaagcaaaagatactaagtgttggcaagaatgtggagaaaagggaattcttttatggtgttggttggaatgtaaattggtgcagccatttgggagaacagtttggaggttcctcaaaaaattacaaatagaattcccatttgattcaccaatcccgcttctggatatatatccaaaggaaataaaatcaggatctcaaggaggtatctgcacccctatgtttacagcagcaatatttacaatagccaagacatggaaacaatctaaatgtatattgtcaaataaataaaacatggtatatgcatataacggaatattatgtagctttaaaaaagaaaattcttccatttgcagcagcatagatgaacttggaggatagtatgctaagtgaaataaaccagacacacgcggtcaaatactggagaatattttttttgtggatggaaaggcacagtgtgtaagaccagaagctctgagatcagatcgcctgggtttaagtctatccacatcataaactgcctgtgtgattctagaaaagttgtttaacctttttgtgcttgagtctcccaatctttaaaatgtgatgatattaatacataattcataagtatataataattaaatgaattcatcttttcaaggtgtatagagcctcatctaacctagattaatcactgtacatgtttgttagatagaaaacaaatagaaacctacatatatagaattataaaacatgtatactttctaagtaaataatatatggttatatattttaattattagtggctttaaatttatagtaaatagttatcaataaatgggatttagaggttacgtggatgtctttctgccagcttgcagatcattgtctttctctgggtcagtatactctttgggtgtagtgatccccagatctctttcgtcagatctctaacagtctgtttttccatctttctgcaaaaaactagcttcttgttttaccgagaaaatataagcaatcagaatagaagttgcagtactcccactgacctgcatataagctcacagactctactttccctttgtttacatagatgaactttctgtgcttttgtctaaggccagcttttccacttacgtacctggatccctttcccttgtctctgcacaaggacattgtaacagctaatgaacagccctctacctcctacatcttctccacgctacatcattcccatcattcccatcagtagagaattattctgtaatatctcctgtcatttaaaagaatcctcaattggacaacaatctctctagcaacctctccattcccgtttccctttacagacattcctttctctccatttcactccttcccttctctcttgatgccaattaagagagctaatcaaactgttatcctcactattctattaaagcagattttgtcagggtcatcagtgaattcgtattactaaatcgctaaattcagttggcttctgtgtcatcattctttcttaattatctcttagttttccctgaccactgtcaatatccttggtggttctattgccctgaccactaaatttgaaagtgttccagggctcagtctgtggactccttttttttttccccctattaccacccactctccgggtcaacttatcaagctccatagttttaaatgtaatctgtaagttgttcctgctgtaagttttttttttttttttttttaacaatctggaccctttctaatgatcctagacctgcatacccatttgcccactcaacacctccacatcaattaataataggcatattaaatctaacatgttaaaacaaaattcctgatgtataccccagtctactaccctagaaatttgcctgttattacaaatggcacctccatctttccacttattcaagccaaatcccacgagattttcttgtctcctatatttctcttacagccgaacatcaaatctatcaccaaatgctgtcgtttttgccttcaaaatttccaggatccaacaatatctcaccatacttgagcacgtgcacacacacacacacatacacacacacacacacacacacacacacacacacacacaaagtatgtatgtgaatgtatagtttttactagaagtcttggctgaattccattagtccctctaatatttttgtagcttcaccaactgccttaaaagattataacagagcagagtttctaagtagaaatttagcagcaggatttcttaatttataaaatagcaaaaatagcagcatgttttcttaagtttattataggttcattgactgcacaaaataacatttataccttttctagtacaattgcaagacatattgttctagatgtgttagggtgaaacatttatttacattgtagtagatcaagtactacatttacctaggtaagtaaagaacctaaaatgaagtattatctatattaggctcaaaatggttgtaaattataaggaaaatcaatgcgatagtgattctacacatatttactattgggcaaagtaccatgaacacttcattttactaaaactgtgcattatatattaatactatgaaaactctgttacttaaaatgtataatgttgtttcaaccagagagaagaataccatcttttgaatagagttactttttaaagtaaaagcactatgtataatgattgtaatactatagagtgccttgtaacaaggtgtatgattttcttttagatgttttaagttttgcatttttctggttaatgagtaatggagtccattgtagaaagttttagttttcaaaaatgcgtgaggctttaaatagcagatgttttctataaccacagacagactcttttgcaacttgcattttacacgtaaaactttatattgagccacttttcatttcagtaaagatgtatttgtgatgcacagtatcccatagtatatatatgtcataatttaatctctcatgaaagcacctttgggtttgttttcaagatgtttggtctttaaagctgaattaaatattgtacatgttagtctctacactttggttggcatgattcactctcaaaaaatggagcagttgactcagattcgtggacattaacatttttatatgttttgccatcttactatctaaaaggttgtattatgttggatatttccctcaacaagtataaaaactttgattttcccacatccctgcccaaaatgggctctttattaattattatttttccctgtcttaacatgtgaaaatgcattaattcacttcgatttgcaatcatttaactataaatggtattagaacatcttttatatacatgtattgccatatattatcttctttgtgaattgccaaactacgttttatgcacttttcgttttttctttttaatttatgagagtttctgtagatacatgattatgaagttcttagaatatttaaaatagtaaaacattatgaaagaacacaaagaataactatttctatgtatgccaataaaattacttttccaactgaaacatattattttaaaaagccttgtttttctccattcacagaaaagcattgtcacacaaacagctgaattatcatcatcgggcaatacgttcattttattaagtatgccaaataaacagacatgtcttattttcacacttatgggaaattgagtgtatctgatccccatgagttattttcttatgcatataagctttttacttctttatcattactatctaagctttctgttatttacatactgatgaaataatataataataatgtttcatcactgtcaataatcgtgttttgtttgtttgttttgtggaaggtctatgccagaaaggaggccttgaagggaggtttggagaaaactgtaagcctccagaaagatctatcagagatgcacgaatggatgacacaagctgaagaagagtatcttgagagagattttgaatataaaactccagatgaattacagaaagcagttgaagagatgaaggtaaaaaaaaaaaaagaaaaactaagtaaaacaaaggaaataaatggaaaaagaaagaaatgcaacaatgcttgaagttgtatacagtctgctctttcctggttctaagagaagaggttgatttttaattaataattttaatttagcttcaagtttaatatacattttaacaaccttaaactgtttaattttaatgcattgtggtcaattatgaaaattgaaaatcacaatttgaaacaattttcccttgaaatcatgtagtattaagagagcagaatcaactcatttcattaactgtctgtagctgatgtaaatgtacgttgaaactgtgcaaaagtattcttgaaaagacaaatttataatgtagtcaacaaactgtgttaatttggtagtttgaaggcatttctgagaatttggaaacactaaatatttgaacccgtagcctttaatatggatagaaaggactgagtttacatgtacttttcttgaaacaataggacaaaatataacattgacttattacgaaggaaactggtatgtagtatgtagtatggatttggaggtgaagcctggacttgaacctacatagtggcatttcgtatggccttgggcaacaatataatagtcaatataatcctctgttttatcatgtttatatcatcatacttcctcacttgaatgtatgaactgttgattgtaactaccatgtgagtaaattgcctaactcagagttggtgctcaattagtagctataatcataattattatttttatgtgctagcaagaacttagagaatgacttgaaatattaatactgtagatctttttttggttcaaggattgtgacaaggaaaaatcaatgtggagccagatacttgagtttaaaacttagttcggccccatgccaactgtataaattggggtgagttacatgagcttactgagccaaattccttcgtttgtgaactgggtatcagaatgtctgctttcagaatcattagagggatgaaatatgaaatttctaacacaatgcctagcacagtataaatgaccatgactcattatttattattttaattgtgaaagggccacatggtaaaaaattatataattaaatggtaattcagaaatatctattatagttaatagcagaaagtaactcacatgaaaactcagatgtttaaatatcgaatctgtcatacggctttagtcaaatgttgaaagtaaatatctaatatactccataaatatgtataaatattatgtgtgtataaaactataatgaagaaaaaattagtataatcatttctagagtattaaaaacacagaattattctaatctagcaatagcatatttatcaactaaaacttattgcatacttactgtgtgccaaacaccctctggctactgaatatagagggtggtgagcaagaccactgccttggaatttacattctagtgttctagcgtgtggtgaggagcaggcaataaatggaaaaataaatgaaatcatgataatttgcctagaagtaaacatggattttgaaatcaagaatgaataatgttcaggcaggatttgagggtggtaggatgctattttagaaaaacttgacttatagagcatttatgaagaattgtatgtaatatgagagaactgaatcataaggaaaagccaaccacttaaaaaaatctttatggaaacacattctattcagagagcatagcttctgcaaagaccctgaagctaattgggaagagaaagaaatctgcctgaaggaaggaaaatgggataaaattacctcagataagtcttaggaggtgggcaaatatctgttaacaaacgggttttgttagagtatcacagtttttattctaaatggacaagaaaaaccattggagtatttcaaaagaccaaaataatttaaaatttgactttggggaggtcacccctgaggaaaactttatcagaatgtgagagctagaaggtactttgaaacttgtgtaattcacacttctctctctgcttatcagaaaactgcaattcccagataggtcaaatgatttagccatagtcacagactttatttgtggtagagcccacaggattgaaggtattttattctatttcatctcttttttcctttcctttcctttcctttcctttcctttcctttcctttcctttcctttcctttcctttcctttcctttcctttcctttccctttccctttccctttccctttccctttccctttcctttcccttccctttccctttccctttccctttccctttccctttccctttccctttccctttccctttcactttcactttcactttcactttcactttccctttccttttcctttcctttcttttccattgtgtgtcactcatatggccttttctcttgtatctcaattcctttctcactgcgtctatttatatatggccactacctcagatccgtaagtagatactatagagtcatttgtgttcagctgctctgattatccctgggttcctttggttcagtgcctcttctggccctcttccctctccctatgagcgatttgcctatgtcaccaacaacccagtcagatctctcttattttcctgtgctctagagtaaactgtctcaaatttttaaaatttgaaaaccatccttgaaatgagtgttccaacaaatttgtctacattgattgacatgttttgataattggtctagctacaaaattggtttagtatgggggtgatagtaaaaagaggtaaactctggaagcctctggcaacaaccactggaagagttggcaggaagatttcatttcttgagttttcagcctgctactcaagacagtttctttaaggcaacttcactacctggaggttagcaatagtaccttgtccagacttctacctgtgctcatttgatagctaatttttctttattgtcagaagatactaacagacctattttgacatctctccctgatactcaaagaagaaatagagacccccccttctgtttatgttctttcctgtgttttacctgaaaatggaagtgctgttttaataacttatttttcccctgaaaaggaaagtttttttgacataaaagaacccagggtacagtttgataaacaacctctgactttaaaacttttatggagatcagcaatcactatatggtaaaactttatactaaaaccctttgaaaaacactctggaaagttattaactggttttatttttttttaatttttactctattataactctagtactagtgcttaccagaacttacacataaagtgagaatagtaaatacacaaataaatttgtataatcactacagcagtgattcctgcatctgaatggacatcagaatcacctggaagtcttgtttaatacacagagtgctgggccctgaccccagaatttctgattcagtgagtcttgggtgaggcctgtagtttttcatttttaacaagtttgagtttgataccaaagaacaagttgcagagtgattccaagggtgctcactttaagaagcacgggtgtgaaatcctagcaatgaaagatggcagagcatatcatagttagattcatggaaagaaacaagagccaccgtttttatgaggatttgtatagaaactgtaccagtcatttagctttctaccttttctcctagtagagaaattcatcatcatcttctttcctcatatgtacctggattaataaattttgctgtttgttcttcgaacctttcccaagatctgagcctcttattaaaccaagaatatatgaagtctaaaaaccatggaaagaagtgttcttcattctacatttttatatagttgcttgggttatttataatgagcataaattgtaattttattcattagactgactacagcatgctccttcttcagctcatggaacatttgagacccgcttaacagaaactatgagaaagagaggatataactctgaggatgatttccttaaactctctgaacctcagttttctaatgtccaatatagaggtaacaaaacacatccgagaaggtttgggtaaagatctaatgaggtagcacttatgacatggctggcacagaacacagtagcacatattaaatgatgaatggtaatcaaacttgttgattatactataattactaaagtcaaaatgcaatttgtgtaaaaacaatctctatgctcagtgatgccaaaaagctgatttatttagaatattgaactaaagatttcaatcaattaaaatcggtgaagttaagcattctatagacaaaacaatttgcattttctgacataatgcatacttttaaggaattgtgggactaaatccaaaggagtagggtgattatgctgacacatacaaaggcattttatagctgaccttatccatatcctgccaataagcccttaccttaaccaccgcattgtatgcaggcccaacttctacattatagaacctgagttcctttacttgagggctttctgtggccactgaatcccacttttgcacttgtgtggtaggcttgcaagtactgggaaattaacatttccccaacagcctttaacaattagggaagatgatacagaaataataccccaatttcttcacccctgaatgggataacccgcaggcatatatttctcagggctttctaacaggattaaactctagtcattaacagtgtttgctgggattaataagtatgcccatatggatgtctcttccctttcttgtctcaattccccattcagctaccagaatttcttttacatggcacacataaataaactacttatatttgaaagctaatgtcaggtttgacccctggaggaacacagactaaagatacagtgtgtatgtgtgtgtgtttctaaaatacatgtacgcatttgaagttaaggagtgtaaatgtctcccaaccgaagaccaccaccaactctcttgtagctgaacaagttgggttcattattttttgcaatgagggagaatacacaacatggaggccagggggtgcgtgtggatgaaaaaaaaaaaaaacattgtaggatttgtgcttgtgttaggggatttgagggagggtttaaaagctttactttggattgcttgtcattagtgtgtagggatagctatatgggtatcgtatcttgtccagaaggagagaagaccagaatgaggctaaagttgcaattaataaagaaacggcgttcgttcatattaaccaggataggagagtgttgggcgttttgtggtttgggtaatgttgatgtttttgtctggattcagacatgattatggaatgatcttgtcatggtcttgatccattatggaaacaaagtggccttttccaatgttgaaattctgtgaaacagtttattttccacttgagaagaccaaggcatagctgggtgtcaggccagcttctgatatcagcagctccttttttggtttctctttctctcatgtgttttcaattctcgaacgaaactttcttttatcaaaatatgttcctaaatatagcatcaaggggacctttctatgttaagtatcctttaacttaaataatgatatttgtgatggtttcaatattattcatccaagtaatttataagtgatttcaattctagactgccaaatattttttaacctagttaatattgaaatatttgtttcttgccttttccaaacaattgtatttatatcaatgtgtatatatttgaccacaaatccatacctccatgcagactacttttcagtctattcttgttacagatctgttgtattcttataataaattatttctttaactttccaatttcaactaaacttaaatttatggaagagactggagttcatattagatttatttttgtaattctcattctaactgggatgttgtgagaaagaaattatatgattcatagaaatgcattttggatgtaaagttattttcatgctattaagagagcattctttatttttcagagagctaaagaagaggcccaacaaaaagaagcgaaagtgaaactccttactgagtctgtaaatagtgtcatagctcaagctccacctgtagcacaagaggccttaaaaaaggaacttgaaactctaaccaccaactaccagtggctctgcactaggctgaatgggaaatgcaagactttggaagtcagttgcttttcttggtctttgtcaatgatatgtcaatacatggtcatatgtgaggcatagtggttaagaacatggataccagtgcaaaacaactttggcttgaattcctcattcaggcacttataagttgtatgactttgggccatttgcttaacttgtgtaaacctgttttcaatctgtcaactagacataatacataattcataagttgttgagaaaattaaatgagctattctctttaaactacttagcctagtactcaatatatgtgagtagctatgcttctaattctcattactattattaggtcataaaatcctataaattttctccagatttatagacaatgatctttattttttcttatttttgtatgtacataaacttatttaagtatctttggggaaaagcattctgtagagaagtatgtttttactacaattgtctttagtaattgccgtgccccatagagttctttgttagacatgttacctaaccagctctatattttttgatggtttgcattatatttatgtattatcacaacttctgctttaacttttatggatgggccttactgtctagattatgcttatctgaatttagataaagaaagcaggtgcctcaaatgatggccatgtaattgcatcaaaaataagctatgacctttcttatgaaaatactgtgccaaggggcacaaaactttatccactacaaatgctgatgctgccagacattgcacatgagttggactttaagcccccttccctcacacagactgagttattttggtgaatatggttaataaagtgttcaggtacctctttacttttgaaaaacattatttagtttgcttcctatgttgagggtttgatatttaaagaaagatacgattcagatcaataataaagtacacctttaaaaatattttaaaatgtatttgtagctaaagtaccccatatattcccaatacagtattatcattttccaattgtaaaatgtgatccgagtttctccattatcagttctaagctcttctttactcatccttattcttttcttttaaatgcaattcactcctcagactcttgaaaagtgccttctatatgtcaggaaatattacagtttctgaggatataatgacgtatcttatgtatcagtgttatgtgagtgctatataaaatataacaaagaatgggaagggaagggatctgatggcactgtacatgtctcaagaaaaccacaattaattcactaacatgttacaatagggagggactttttgtacccaggaaatgctttctgacaatgtttaaataaaacacctactattactttcttatgttcttaatgtccttaaataagcatcattgttccctattattcatgttgttcatttaaatgatactccgtgattcattagaaatttatattggagtacattttccgaagggattttcttaagttttcgtattaataacaaacttttcaagaccaattattggattatttttccatttccttctcatgtataataacatttctaacattccctattcatattgaagttatcaaattattgagttccattttagtcctttttcactggtttggaatatgtactttattttatcttataaatatttctctatacctctctaacaataatatggtggaaacattagcatagtttaactctgaacctacctcttccgttttccgcgttattgttgcctcatatttcattttcaccttatttcccccaaattagtccatataattgctgttgctgctgctgttgttttaactatttcatataatatttatttagatttaccgatgctattttcccagtttttgtgatcagttttgccttttgttcttccctttgcttctgtgttcagtttctttcttgctctttccttgagtgtgagtagcaaatgtgttcagattttacatattgaaaatgcctttattttgccctgagtattggataatgatgcagttgagcaggaaattatgtaaggacaggtttttttttttcctacaacactgaaaatattatttgtcttttgaaattttttgcctttaggaaatctgctgtcaagttattgtttctttatcattttctctggtacctttaaattttctcttcgtcctgtctgctctgcagtttcaccctattttgtcttctacagtttcactcaactttgtctgtgtgtaaatttgctttcatttatactttgtcacctggtgtgttaattagaacagatacgttatttctttagtggttctgcattgtctttgtgaagattttctttttcccaatctcttcattccttcctaagggaaaactttcttagagctattaagactatccccttcttatattccagttactggtttccctttaatattttctatattcttatctctatctgctcaattttggatacttttctaaaatctgtcttccaactctcaaattctcgcttcagctgcctgtggcgtaatttatccttcaatagagaaatagtctcatctttgtctgtatatatatttatctctctacatttatgtatgtgtgtttatattttttcaaaaaacatattttccatttctcaatattttattgagttgtttcacaaatctgttctttgttatggttttcttcttttttgtgattaattctatgtattcctttaaacaacttaaacagataccatctgtttgactgaaatgtttcaacttaatgagtaataaacatgacaccgtcttatttttccaataactacacccaactctgtcaaatttcaccttctgcctggtagttggcttctttaacaatatttctctgggatctcattactttttattcacttttagttattaaaatgtactctaatttaaatttaaatatcataacttaatcaaatatttcacaagtttagattaatctgttgcttcagcaatttatacagacgcaggagtgagaataaatggtctcacagtctcctcctccatcccagtttctggatacagatctactgtcgatataagggagggtgaagagggaaaaatactctcttcatgtgaaagtcctttttttgctgctcacaactgctgttcccttttgttaaaacccacacacatctataatgcctagtctgttgtccctcttctatatattatcaccactgacctggctcgttctctatagacttgattcgctctgttgaggatccagattggccttattcatatgagctttgaaccccccaaaaaagatctcctaggcttttatagtacctcgtagtgtttaacaagaatttcaagctgacgcttgtcaacagctttacacaaactgctcttgaatattatgtctttttaaccaatgctttagtgatgccctggagtctaatttacctaccatatctcaactcagagcctatgggcactggaagtacctatactccgtacctttcaggaatgagaagtttgaaagagttgtttttgattccttcttggccataccaacagctcaacaggaaatgaataccaaccaccccttcctgaatatatccacccagtagatgagtggttttgttttagatcctgtaaataaaatgattcagatgagtttaccctacctatccccataaaagggtgagaaagaagaattgcctaactattcaaactctcttcacctcactcccctcaagtctccgtcagctctctctgtttaaaccagggcttgtgaaaacaagaaagagatgatctcccaaaatgaaatgtaggcaaccaagccctttttcttaggtgtgaattccacttgccagtctcaagcaaataaactctatgggaaacatacaccatgaggctaggcatatttattgtacagttctccaaaattgttctattatctttatgtcataaggtatggattctaccatttgttacaactaatgactccctctaatggaagtgaatttccccatgtggctagtaaggtttttgtttgtttatttgtttatttgcgagctcatctataataggaattgcctttactggaatttttgtctttttttttctctgggctattgagtttttgtattgttgccatcaggattgtagagattttatgctctgccctcatgtgtgatacaagcttaagtttccgtttgttatgggtggatctttatttttcagcccaaaatcccccaacaatagtttccttgctaaatcataatattccaatggctagggatgttctacttcttccttacagggtggatggcacactgcttcattctttcccatttccctggcttgcctcatttcccatctcaagttagtgttaaatgccccagctttgatgtcgtataccctgttctgatacgccagtatttttataagcttgattttccactttctactttcatttccctctttttctttctcacacctgaggttctatatacatgttttacagatcagctatgaattaaaaatgtttcctttgtattttaacatgtattttggtataactgaagcaggatatgttgggagttacctcatcagctccatctactattttgaacagaagtttagttttttatttgtactttccttcaaagccactttggattctgtgatttcaaagtaattttaagatccaaactgttaagcttaacagttattctaagtggcttttagctccaattcgggcttcaagactatattttattttgcaaaggtgacctgtaaagctggtacattcagcctctccagctgtgtccttcagatgcattgaggacagaagaagctatccattctgacagttaaatcagcaaggtagttcattacctcaatctgcaccaaagttaataagacacattaccaatcacgtctccttgtcttcaaagctctaaggtaccctcgggtatttaagaagatatttatattttcccactgggatctttgcccagaatgaagacagcctgtagtccagcaggagctggaaatgacccagattttagatttctatcaccttttaaagcaaaacacttaatttcactttttgcaataaactgtacataagatatcaagcaggtatgaaaggttggtacgtttgccaagcaggtgagactgatacttttcatcagatagagatcgaatactctgtgtcattctaagggctatgaacatagagaactttgggaaatctgattaattttttagatccttctgaaataaatcttcctttcaagcctttaattttggtggtagtgaggcgggggcaggtggtagtaagtggtgatgattgctgcattgtgtttactgtacttataggttcattcaacagttacaaagctaacagaaaatgaccgttgttacattcttatcctctctcgcatcttcctatcttttccccaatagacataatcaccatctagaaagctacctttgttattcctttgtttaaaaaaaatccacacacatatgagtgaaaaaacaattgtgcttaatttcagtattacagtaatggtaaactataatatagtttttttagggctttgtctttcacccaacatatttgtgtctgagattcattcttatggttctttttgatgagatttttcattgtcacgtctgtattctctgtttaaagatgacggtatatttttccattctccttgcagtggacattatttccttttttttgattactacaaaaagggctgaaatgatcattgttgtaacagtcttgttatccatgttaaacagtttctctgaggatgcacatatcaaaaagtggagttgttgtcttgatgggtatgtgaatgttcaccttattgagaataacaaattgttttctgaaatggccatttcagtacacacacccaccaacaataaatacaaatttttgttcatgtatatcttctctcacacgtggaattgtcaaacttctcatttgtgtcaatcaacatggtatctcattgtaatcctggcctacatgtccttgattactaatgagattgaacatatcttcatgtttaatgtatatacatatttctctttaagattttggttcaggttttcttttcattatcgattgggttattcatcttctatttgacttgctggcatttttcatattcttatgtgttacagatgttgcagttgttttcttctattttgagtctgtttttcaattacttgatggtgtcctttgatgaatagaaggtcctaattttaatgtagtcgaatgtattcatctcttttttcttacggtcagttttttacgagatgtcttacttaagatattcttctctatgccaaagtcagaaatattttcttctatattttcttgtagaaattttaaagttctgcttttttatgagtacttctgtgtataaatcagtttcataatacaaattaatggccatttaaaataatcaaacctttgaattagtggtaatatttccgataatatacctcaaggaaataataagaatgtggaaaaatagtccatattcacgatgatgtttaccataaatttataatagcaaacaaaactaaaagtagtctatctaaaaaaaggaaattgctaaactaagatagagccactttaaagaagtcttagattttcattaaaaatatgtcttcttagtaatacagaaaatggtatgatataatgtttagtgaaaagagagctatagttaaactcacttaaattttaactatcaaattatatatgataaatttcagaggaggtcacagaatactggtaacagtgatgtgtgagggagttagatttacatatgcatttttacatatgcttttatttttctgtttcccagactgcaatgttggtgcttatttttattttaaaaagtaaattactgtcttttgaatttattcattattcatgtaataaaatgttttcttaatgacttttgattgtagaggtattagatgatgaaactgtctagctgcattttgaattacctgctacaaagtaaaggtgaaaaatacaaagtgttatattttcagaagttttaataatgaaatggcaaaatttcacatttacttttctaccataatatttaatctgtgatatatatttctttcttaggaagtttgggcatgttggcatgagttattgtcatacttggagaaagcaaacaagtggctaaatgaagtagaatttaaacttaaaaccactgaaaacattcctggcggagctgaggaaatctctgaggtgctagatgtaagttgtaaattaagccaaatgatgataatttatatgcagtattaaaagaggtcaagtaccaaatagaagacaaatccaaagaaaacaacccaagagagtataattactatgttatcactcagcactggtactttggataaagcctttgttccccctaataaccttctaggtcacaagattttgcaaagggtttaaatggcttctcacagaggaaatttgcctttattatatcactaagttctacatagatgcttcacctaattaaatgtaccacaaacctgcaaagacagtgtgaataaacaaactcactgctttagggctaatcgggatgataatatgaaatattatttccagtttaaaagctgcacgtattgaattggaacctattttatacttacttaaaatcacaaatttacaccttacggaatgttttgagttattaaatggatatgctttaatattggaaatatatctttaaagtattcataaaatgtaagtacatttttaagttttactttggagactttcaataattaaatgagtttgcatttataaacttgactttaacttctgacatttaatcattcaagctctatgcattttagtgtacttttgacttatctatatgtaatgaatatgttgttttagaatatgtaatatatgtacgtaaagctataagtagtatagcccctctgtaaatctataaaataaggagcataaattattcaagatgtgaagaaaatgtaaggtatttctttagacagaatagaatttgtaatcctagaacatcagagtagacacctatagatcattttatccaacttcctaattttcaaaaggaaattataaaacctgaaaagatattaaagtacaatgaagtagatctccagtggactttaattttggctctatctgactatgactataaatttgtcgtattcagagaagttaattgaccaaacatttcttgtgaatcagcaatgtgttacatgttctagaaaagttgcagcaaatttacagcacattaataaaaggacagtggccagaacagaagataggatgatgctgttagcctatgaaattgtcaaatcgtacatggagcaccatgctaaattcttgctctcacagtttcagtgatgtgctgaaaaactagggcatgttcacaaaggaatgttaaggaaagagagaaaatttgaagccataatgaagagcatttagaaaagatggggaaacaaaacttaccattactatttactattttagacgaggccctcacaatgcccacaacacagacaagcagggaggaggaaaattgcgagtgctcttatcttttatttctatgttgtggtcataatttcaaattgttcctaattcagataatggagccaataaatgaaattccacagtgaaaaaataaataaatacatacataaaattggctctttggtagtgttgctgatgcttatccaggaggacattttgagtgaaaagggctagatcaccacgtatcaaggatagaaaaactgcacgacttctaggttttcttgcaactcaagatatttataactgatcccttaattttgctttgttgcttttcatccacctttaaaaaaatttaacaaggtatatactttgttaagacttataaaataatgtatccattaaaattatttatatccattttgcaaataaatatttacaaaattaagatttgttagaagtaataaggaatataaattattaggaaaattattaacaatcacattgttctactcaaaaatttgatggcttttaaagtattttacaggttatagtgattttttttaatataaatgtatttaggaagtctctttattttcttgaaacttaataggacaatgtattgagtttgctcaaaattcaagaaaaatacataaacaggaaaaattacaaatatgtattggaagattttcatttttttaaaacaaggaaaacagaagatttaataaatttgtgagaacatatgcccatcacttattttatagatatgtttgaggtccagtaagatgaaattgaatcccttgttttctggcatgcctatgacactgagattcactttcatcatattatctagccaggcaactttgtcaattttgagcagtataggagatgggtattattgggatgtacgtaacagagaatcagacaacggtttaagctcacaaaatgatcttttctcaccacgaaaagaatagtgaagggaggttactcagggttgaggatggttcagccatattatgaggcgagtaggcactctctgctctctcttcctgagcatgaaggacctcacactcaaagtcattgcctcccagtgcaaagatgattgttatacctccaggccatgtatgtgcaaaaaagtaggaagggcaaaaggattcttcttgagagagtactctttttcagaattgtgtcacgtggacaccactagctatcagagaagttgagaaatttagtgttttacctcttctggttttagagttaggggacgtcaaggaaaaaggtggttgtgaatcaagttttaagttctcagtccgcaacactgtcataatcccatgaagattcatatagaatgacatcctattttttgaagcaaaaatgctccttggtgtttttaatcccaattaaaatttgctttaaattgattatgacttaattatatgtaaatcagaagatactgagcatttgctgataatccaatgtatttagaaaaaaaaggagaaatagtaattattgcaaatgtgtttcagtcacttgaaaatttgatgcgacattcagaggataacccaaatcagattcgcatattggcacagaccctaacagatggcggagtcatggatgagctaatcaatgaggaacttgagacatttaattctcgttggagggaactacatgaagaggtatgaagataagtgaaaaatctctttaatctaatttgcattaatgtatagcagatacaggcctctcagataaaatgagcaatagtttaaatattagctcagctttcaggtttcagagacaatccaatgccagacactgggtaaattctttacatgtgtattatagcatgtgatttcacaaaaacattgtaagttaggattcttaaaaggcaactgagacatcccaagaaggttactctgaccacagagttcttttccttactcaagatagaccagtatgtgtgggtatcctttctctctcgctgtctcattttattcctctccctccattccacacacatttgttatgtcacatgtaatctgctaataatacatgcaattctgttagtaccccatattatttattcttcataaataacactacatttcttatagataaattttcatatatcacacatggtgtgatttttcaaatcaaaactaaaacaaaatagcaaatttctcctagtcagtgttttgcatactatctcctaagaatggattatttgtcaagaagaaaacccattttataatgatgtttagttttatattcacttactgagtacatctactacatgtgagatatggttctatggtttgatgagtaggaaaaatttgctaaccttcataacttaaaaacattggttagttaaggaagagttactgatttcctagaatgtgcaagacataaaaacaaataatataacgtatgaagagaaaaaagagaataagggggggtagtaactagggtagtatgcatgaaaccattgactaatgacttattgaatagtcaatgtcggggaccttttgacatgcttacagattgaaaaggaacgccttgagtaggaaaacctcttctctatccaattctgaagagaagtatgtgagggtagggcagatatctgcaaatgtaccagcagcacctccagtcttgaatcctgggtggcatatccatattttatccaaatcaacataaggaattggggattggaaaaggggaattccaaacaatctctggtccttcatcattgttgcactattgctggatctgagtcaaatagatattgctatgtggcaagtaaattgaagatcatttcaatgtgggttgtgatatggaattggaatgtgtttttatttctatttgaatatcagtgtcaggtaggagacagcagttgcatcaaaaaattaaaagtcattgtgaaactgaccttggcttagctgtgaaaagactcaaatttttttttttttaaagacagggtcttgctctgtccctgagactggagtgcagtggcatgatcgtggctcactgtagcctcgacctccctgggctcaggtgatcttcccacctcagcctcctgagtagctgggactacaggtgcatgctgccactcccggttatttgtgtgtgtgtgtgtggaaatgttgttttgccatgttgtccaggctggtcttgaactcccgggctcaagctatccacttgccttggcctcccaaagtgctgggagatacacctggccaagatccaacttcagtgtttgacatttttcagtactcatctattctgtccttaggaatagcttactctctaacttgatcttggtattaactctattaatgtaattatattgcaatcctttattaacacaaaactacttataaccttctattttaaaggtttttggtataaaccctgacatttcccccaaagaaaaaataattcatttcagcaacataccctgattcaacacgtattatcttattttctggactgagtttttaaagcataaacttttgaataagaaaatacttgaaacttgggctagaataacaccttgtattagtagtcagggtccagacagggcacagaaaccactcagtcacttaaacagagatggtttaacacaaataagtattaactacttactggaaattaatttttaataggaaataaaagagatctctaaagaataccttaagcctgaggaatagtacacaaacaaggaactaatatggaaagataggagctcaacccaaggctggattcaaacttctttagaaagtgtgtgtctgcctcccatgggatgacagagaagtttccttcattgacccaatccagaacaagtctatagccagtgagctgaagctagtgtgaagagaatattggaggggaatgctgacaaaattcacagggaagtagcctatggtggggaaccattgaatttgctagaaagctgtctggtgtattcattggacatggtgggaaactacctgtagtggatgctactaaacttgaggaaatgaggtggggctccaggaagctgcctatggatttgccacccatcctcaatttgcttattgggtacccatagaacttgtcaaacacgacccatagtgttgctgaaagtcttctgggtaaagtggggtggatgaggtgagccttactgggcattccataggccagcccagagtcacaggtttgaaaaagaattaaaagcacactgggacagacaaacctctacctcccccattgtcactccagcatcctttactgacagaacttaatatcatgtcagctggcaaggggagaaatgttcccgtgtcaaaaacaggatcatgttgaaaggcaaaaaattgataactggcaaatccctctgtaattcactggctatgtgattttgagtaacagttttaaacttacgtttcctcatcctgtttcatagggggttttttttgtgagcaaaatataaaatacggcacttaaagtactatggttccaggaacacagtacatattcaataaattattcaataaatttaatacatgatcagcctttttattttgactagatgatattctagagtatcagccctcaaaaattgtgtgtgtgtgtttgtatgggtgtaaatatatatatatatatatatatgtaagtatatattaaaatatgtaaatatatatttaaaaatatgtaaatatacatatatatatatcccactgagggcagtgattggtaaataaatgcagatagtgcaatatgaaatataatgaaatgcacatgcctccattagttaaataaaatgtgaagacagataaaaaggatttttatcaccctctaagtcttaaaatcagaagctctccacttgtacctcaatgattaagcagagtgttaaaataacaataaatctaaaataagtaaacttgaaactattatcagtcctagctgtgtttatattacatatttggccagtaataacctgggagttatttgacaatgaaaataaagcatatttagtttttacggctttcatgaaaaccacatcatgttaaacataatatccttctcaaattctgttgtatcagcctgtgataagctgattagacctgaaagatacaatgttaaattaaaacaatgtgtagtaataggacttttgtatttctcaggctttgctcagcactttgatcaatttcaaactacttaggtaaaaaagacacacctaataatttattagctaaatcaatcctttggatatttccactatctagttaaaaagactgttgtttcgatgcagtagaataagccttgggataaattatctgagaggctgaagaaacaaaatgattacagtaactgagtttttaaatcaatttaaaaaattcttgttgtacattaatgtgttataatcaagaattctgaatttgttttaggccatgattctcttgatttttggttggttaaacaaaaaagtttttattttgtggttattttctatttttattttattttatttttttgagacagagtctctccctgaagcccaggctggagtgcaatggcacgatcttggctcactgcaacctctgcctcctgggttcaagcaattctcctgcctcagccagatttgctattaataaacaaagtgccttttaatttgaagatgagccttaacctattttttaaaatcaattaagtgcctatgtcagaggtttgtgaggtttttatatcacctacctaatgtttcttatagctgcaattatgcagaactaaggtaacattcaattgcctgttaaatcagtcaaacagccagacttttattgcctatgaatatttaaaagagatttgctagatcccatccctaatttcagagtgtgagtttgcattcaaataagtaataaattatttccatcacttcaaaaggcatctttcattcttgataatcatatagcactatattttctactcacagtaatgatttgaaagatggttagcaaaccaggcaacatctccaacagacgtaccaaatcatatcatttttacaactattgtaatagctttattctctaacagggtaaccaagcagcagaagatgatttagtaatacaacaaaatgaataataatattggtaatagtatttggttacagaggctcaggtacccttttaattgtcagatatgcattttctcatttagttctcacaatagccttatgatacatggtggtttttgtttttgttttttctttttttgagatggagtctttccctgttgcccaggctagagtacaagggtgcaatctcagctcactgcaacctcctcctcccgggttcaagcgattatcttgcctcagcctcccgagtagctgggattactggcacatgccactacgccaggctaatttttgtatttttagtagagatggagcttcaccatgttggccaggctggcctcaaacacctgacctcaggttatccgcccgcctcggcctcccaaagtgcttgaattacaggcgtgagccaccgcatccggccgatatatggtttttcatattcccattctacagaaattgaaaggatattaaaggccctaggaaaaagctattgagcatttagacccatctctttacacttgaagcctaggcacgtgaccatttggctacactacctccaatctctgtgacccttttcatatattaaaaataaaaactctgctaataagtgaatatggcaattaacgagtttccccgtttttaaggaaagcttaaaacatggccttaaaagtattatggctgactaattaaaataaaatttagagtcttaaatattaaagtcacacattgagaagtccaaagcctttaccacttctcttgatgagtgattatttcacctctttcgtggcttattaatgcccgtatttcagtccctttcaaagatgtctgtaagttgttatgcctgacatgaaatagcaaatttactgaaagggacaaaatctaaattggttaattcttctgtaatagtaacatttatgatagactcagagagggccgtattaatttttcctggtaattatgactttgaatttttccctcagtgtcacatctaccttagcatagatagaccagaacggaagaacattgcttgaaggaagactataaagtaatctaggaaaataagtggcatattatgctttattaatttgtcaatatgttttgtagacaatatctgtctataataatagtaaaagccattactttttgagcacagttttacgtcagtccttttgctaagccgttagaagcaacatcaaacttaaatcccacatttgctttatgaaatagatttgattagcttacttcacagttgttgtgatagggctgacttctgttctcaagggctaggacagctaagtcttctgtaatgccctctggaaagcactaggatgctggaaaatgtctagtagttgtattttatgttgctttcaaagaagtataagtaaacctttaaaggctaggaaaaaaatcagatgaaactgaagtcatgccgtaacatgcctatgaccactgacatttgtatggtggagataaaagctaagactgggaaccccaattttaggtgaattaagtcatttgatggaaaagaaatatgatcctctggctcacgaaaatggtggagctaaacacagattccacataaaactggggttctatcagtaagataatgggcagagagaattctatctgcagagagaacaaacataaaaagacatctgtcttctcactgtgagtgcaaagtaatagaataattataataatgtcacctgaaaatgtgtgttggcctattcttgtaaggtgaggaactcttgagtgtatattatcacaaagggtaaagaaatatccaaacaagtgattaagtcagggtagcaccaggttaggagcgtcctagcattagttagaagcaaatgcaaattgtttaccatgaaaagtgccctcagtgtcctcacagattaaactcaggggaacttgagctcatcataaacacatagacatacacacactcactcacacgcacaagaaaagccctcatgaagcacagtcagcctatacaacgaacggtgagtttacttctagaattccggatattagaattgcaagatgtatagtataaaataaataggtaaaatattatagaaataaatgttattgaagttataaaaaagaaaacattgtaaaaatggaataaagaaatcaaaattaaacaactacaattaaaaattagaaaatgaatatatcatatataaacatattagttgaaagaaatgatttaaaagaaaactaaaagagaatgtacagactgtgttaccaaaaactaaggaggtggaagatgtgaacaataggtaatagatacaggggtggggagtagaatatgaacatataacttatctcaatgggagttttcaaagaggagaataaagaaaatggagattattattattcaatataaaaaaattatataacccaatttaaaaatgagcagttgagctcaaaaggcatttcttcaatgaagacctacatatggccaacatatatatgaaaaggtgctcaaactcattaatcatcagggctatgtaaatcaaaaccacaatgatatatgtcttcacatctgttagaatggcagttacttaaaaagaaaatcaagagatgacaagtttggcaagaatgtggagaaaagggccccttgtaccctgatggcaggaatgttaattcatgctgacactatggaaaacagtatggagattcctcaaaaaaaaaattaaaaatagaattactatatgatccagcaattccacttctagggatatatccaaaggaaattgaatgagaatcacaaggagattatctgcactctattgtttattgcagcattatttacaatagcaaagatatagagacaacctaaatgtccattgacaggtgaaaggaaaaagaaaatgtgatatatacatacaatgaaatattattcagcccttaaaaaataagcaaatcctaccatttcgctgtaacaacatggataaacctggaggacattatgctacatgaagtaagccagacatagaaagacaaataatacatgatcccaatcatattatgaatctaatacagtcaaactaatggaaggagaatgtggaatgcttcctgccaggggctaggggaagggaaaaatggagagatatttgtaaaagggtacaatgtttaggttatacaatatagataattcctagagatctactgtaaagcatattgcctatagttagtctatttacttaaactttgctaagaggatagaccttatgttaagtgttctgttacagaataataataatattagaataggaggaaagttttggagatgatgaataggtttatgtcatagattgaggtaatgtttttatcagtgtatatttatctccaaactcagcaacttgtgtatgttaattatatacagctttcttgtatgtcataatttttttgagaaatggagatggagtaatatatgaaggatattaaaggaaagtttccaagagccagtgacataaaccacttaaacagaaagcacattatataacaggcaaagtaaataaatagaaatccaatctcagacatatcacagtgaaagtgcagaaatccaaagacaaatttatattagcagctagaggtgagatggataacctacaaagcaattaaatttaggctgtcattagacttcttatctacaacaatgaataagaataaaaaagcaatggaaaatattttcaagatattgaaaaaattaccgtcaacctagaattctgaactcaacaaaattagttcttcagagtaagaggaaattagacattatcagagtgaaaaaaaagtgaaattttaccccaatagacccttactataaaaatgtctaaaataagtatgaagaattagaagtagtagaaaaataagttttaaaggttttagatgcaataagtatgatgaaaaaatagttaagcttttaaatacaaaaggcatttgttgcaaaaaatatataagaatatctaatttcatttaaaataatgttgatctaaaatactagattaaaaacaatatggaggggagttacagccacaagcccttttatttagaaagagggtagagatagtgattaaatgtcgactttatgctgtaataaattgtcaaggataaccactaatggagcatccacctgggaaacaatcaaagaatgataaaaggaacagttctcaatcagtacgcagtaaagcaagaaagaaggaaaacaaaacagaaaaatgtgagatgagcataaaataaaagaaaagatggtagaaaaatagaaatagaaaaaaatagatggtagaaaaataccagcggccgggcgtggtagctcatgccttaatcccagcactttgggaggccaaggcaggcagaccaggctgccaacaaggtgatacctggtctctaccacaaatacaaaaaaaaaaaaaaaaaaaaaaaacccaaaaaaaagtatccaggcttggtggtgggtgcctataatcccaactactcgggaggctgagacaggagaatcacttgaacccagggaacggaagttgcagtgagctgagatcatgccatttcactccagactgggtgaaagagcaaaactctgcctcaaaaaaaaaaaaaaaaaaggaaagaaaagaaaaagaaaaaaaaaatacatctgtagtcctagaactatttgctcaatacatttaatatataaatgtagaaattttcagaataaagcatcaaaattcaaaatacattgtttttaagaaatacataaagacacatatatcgaaaatggaaacagattttccgaaaaggattaatcaataaaaagcttagacacctaatttatttccagcaaaatagacattatggtcattatcattattaggcaaaaaatggagtaaaatataacagttctaaaacttgtacatacctggccgggcatggtggctcacgcctctaatcccagcactttgagaggccgaggtgggtggctcacctgaggtcaggagttcgagaccaatctgggcagcatggtgaaaccccgtctctgctaaaaatacaaaaattaaccagctgtggtggtgcacgcctgtagtcccagctgcttgggaggctgaggtgggagaattgcttgaatctgggaggcagaggttgcagtgagctgagattgcagtctccactccagcctgggttacggagtgagactctgtcaaaagaaacaaaaaaatctcgtacatacctgggaaaatacctttaaaacacgtaaagcaaaaatccacagaataacaagaagaaatacacaactatatcagcatggtgggagatttcataatgcctctttctttcaagacaccagacaaaagttagtgaagatagtgatgattaacagttgataaggtggatataaagactgtatagagaaccccaaatcagagtgtaaatttcatctgaagtacatggaaatgtcaatacatttcacatatttggtattattagggaaatactcttaaatttgtaacaagctagaatcaatagtaaaaacttgactaaagtaaataatttgtggatcaaagatgaattcaaaatggatggttaaaattcatagaaccgagtgataataaaaataaaaattaaaactaattggttcctgttaatttttgtagaagagacggaagggctgaaaactagtgagctaactgcccatctcaagaaaatagggaaaagtataataaatgcagagaaagtaaatggaaagagaagaattcaagagcagaaataaataaaaacaacatggaatcaataaaatttaaatgcccatattcatgttttaattagacaaatcaactgagagggaagtaaaaacaaatataaaatcttaaggatgaaaatgttataactacagttataatatatttttaaaatacagaaaatactaaaagctatgcaaataagtttagaaacttacatgaaatggatgaatttctaggagaatattgctacaaaaatgatggaaggggatatagaaagcctgaggagacagaaatttaatcacaaattaaaagtcttcctacaaagactatattagactgaaattattttacattcaaatttgaacacactttctaggaatagataattccagtcatcaacaaactcagtagaacatacaaggcaatatacatgtctggaaaatataaggttagaaaatttttttttttttttaccaaaatcagacaaaaatgaaacaggaaggaaaaccccatgccaatttcagtcataaattaataaggaaaagttctgaaacaaattattggccaactggatccaagtgtgtatgaaacagtgtttaagcttaatgttctccctttcctttctatattcactctttataatactttatgcagtgtcatggctttaaataaaatttacatgctaattattcccaaaatattatctctggcacagacttttgcccttaacttcagaccatatatccagccttctattgtgtatttttctctttggatatctcataggctactcaaacttaacatactcagatgacagctcctatcaaagctacccaacaccgttttctccacctctgttaatgccatctcattcctgaaatttctcataccaaaacttttaaaatgaactttgattcttgtctttctttaccagcctttctcttagcagatctgaaagatggtctcaacagatctagctgttgttttacttttatgttctgggtatatatgcaggtttgttatacaggtaaacagtgtgtcatggggggttggtgtacagattatttcatcacccaggtaataagcatactacctgataggtattttttctgatcctccccttcctcccattctctatcctcaagtaggacccagtgtctgttccctcattgtgtccatgtattctcattatttagctcccacttataagtgagaacatgtgatatttagttgtctgttcctgcattagtttgctaagtagaatggtctccagctccctccatgttcctgcaaaggacacgaactccttctttttgtggctgcgtagtgttccatggtgtatatgcaccacattttctttatctagtctaccatggagggcatttaggttgattctgtatctttgctattgtgaatagtgttgcaatgaacatatgtgtgcatgtgtctttgtggtagaacaatttgtattcctttggctatacacccggtaatggggttgctgtgttctgtttttagctctgccaaactgctttccacaagggctcaactaatttacacccccaccagcagtgtataaatgttctgttttctctgccatcccaacagcatctgttattttttgacattttaataatagccattttgactggtgcgagatggcatcttatcgtggttttaatgtgcacttctctaatggttggtgatattgagcattttttttcatattgttggccacatgtgtgtcgtcttgtgaaaaatgtgtgttcatgtcctttgcccatttttaatggagtagagtttttaaaataaatttgtttaagttacttagagattctggatgttaaacctttatcagattcacagtttgcaaaatatttctcccgttctgtagtttgtctgtttactctgttgacagagttcaacagaggaactctgtgaggaagttgtgtaatttaattaggtctcatttgtcagtgtttgcttttgttgcaattgcttttgacatcatcattacatcttttcccattcctatgtccaggatggtattgcctaggttatcctccagggtttttaaagttttgctttgacattttaagtctttcattcatcttgagttgatttttgtatatggtgtaaggttttattcttctgtatacggttagccagttatcccagcaccatttatggaatagggagtcctttcctcattgcttgcttttgtcggctttgtcgaagatcagaagggtataggtgtgtggcattatttctgggctttccattctgtttcattggtctatgtgactgtttttgtaccagtactgtgttgttttggttactgtagcactgtagtatagtttgaagtcagctaacatgatgcctccactagctgtatttctttgctccttctctcattaaatatagtctctgtgttccaaagtgaggaggaacaactgtgagattaagatttggtaaaagagaaaatgagcagggcaaatagagacaataaatctgtgatgatgaaaaaatgagaaagaaaggccagtaactgaaattgaatagtaatagggcagaaaagatgtgttgttgattttcaggataataaaaatttaagcatgtttgtagtataagggaagatccaatagaaagacataatatataagagcaaagtcttacaagataggatacacgagcaaaaaaaatggaaggattgactttggaagtgggaaagagaaaattgagataatacaaggaggttctgaggtggagagtagtaagtttgagaaagtttatccaccaaggataaatttatccctgagaagtaggtaactctgttttcaggttgtttaggactctgcacggtaaagggggttgggagaaaggagaactggtgtcattgaggaaatgagagtgaaaagtatttggaataggagctcttttgttttaaagattcgtttaaaatcaggagaagtgttagagaataatatcgtggactcagtagtagccaatgaagttattcgcaatggaaataatcagttatctgactttctcccgtaattttctgcaaaataattttatttagaaccacacacatacagccgcatagaaaatcaaaagcgaagggatttttctttgcgttatctttgattagcatctccaggttgtatttgattatattctgaaacaactaggattctagtctgaagtatcttcttccaactatattcatatttgcaagtcattcatctggttaccgccagtatgtcaaatgtgaatttcatgtatttttttttttttttttacaatctctctaacttaaccaatttaattcagatttttatgtcagtcttttagctgttggctgtttttcccaaaatgtcaggatcggctccataatttgggggactcagggaagaaagaaaatactgggtcccatactcaaaaattaagcattgtaagatggcaacagcagagcattaaaccaagcatgggctctcctaagcatgagttactgcataactgcacaggttgcatggctttgaagccaatttcgggtgtcatcttatacatttggttatttgtacacctgaaatgcttttgataaggtttgggagttaacaatttaggctcacttttatagattatcattacttgaaaatatttcattgaggataattaattaacaataaatgctttaatatttagaaaggtgaaatttaatcttattcttagtgtgttaataatggatatagcttctaggtttacatctttccatactttgaattcagggctttctttccttaagtagtaaaaaggatattggatatcttgaatcttgacttctcctaggttgaatgctctgcaaaaaacctttgtctttatataaaaattgcactgcaagcagactattatggcagacctctgtgttcaaggtgactgcaattttcagctgagtggtggactatgcaacttgttctcataataatattaattgaataaatggtcaagagtgattacattttgaggggaagaaacccacttgtgtaatatttacacatagataataaactcaatagcccagacctctttaatgtaagaaaaatagacatgaatgtgtatgctattttctttgtaaattagaaatttttccttctctatttcatgtatcttcttttgttatttgagaaagggatttttcttgtcctaccatcaattgtgtgagttaccttgattcttgtttttaataatattttaaaatacatcttgtattttaaatgtagttaccctctattttatagctacaggaactgaaagagtacatagccttcacaaaagggtctgtggtgaatgtgtttaattcttattttaatcaccatgaatcatggattttttctttgtaagtagtaattccattatttttagatataatttaccctacttcaatcaataatgtttccttggacagtcatatttacttttccgaaatattatataaaacagtagttaaatgtttttgttcgtctgtatgcctattatagaatattagcatttttggggtccagacacaaagggacacacaaacacatatatatacttgcatgtatttatatatacatgtatataagcacatatgtatacatataatcatgtactgcatttcaatatatgattaatatttaagtatttaatattcactctagacaaattatgtttgctcttggagggcattaatatctttgtgaatgagtgttaacatatccatttaatggtatcttgtcttcaaatatctcataatttgatagttgagttatttcttctgaagttggaatagcttttctacaagggcctaccaaaaaaaaaaaaaaagaataataaagttggaataacaaaagagggagttaatacataaaggaaaaccattaaggccgaaaaactaatcagttgtaaaagctaaatcagtagtatggattgataaagtagcattttagtgataaatttttggattgaagtttctcttttaagtttatcaatgtaccttttcagaaaaattcctcgagtttatatctttatgttaatgaaacttgtcaataactttaattatctatgatgattgacaactaatacttaatttctataacacacaatactgttctgagggtacatattcatctctctctttcatcttacgttttaccactctcaactttttaaaaccgttttctttgcaagctacttcatagattcttgagattgaataatcaaatctgttatttaatattcaggccaaatttctgaaaatgtttatttttttaaaaaaaatgataaatggaaaagggaatgttaaacaacatttctttgcagtgtattccagtgtccctagatggaatgaggaataaaaatatttttcaagttcatcatgctgtcttttaaatcataaaatgcatatatttattagtaatttttcattgaaagtatcaaagaaaattggagaatttccttactgtttctacctcactatgtttcgtatattctgaccagcattaataccaatttcatagcactctactgttcgctcttttttgctgtaagcccaactgattgcattttcttacctgttatttttcgttgttgttatttaagacatcttttctttctaacttcggtcttcatagaccttctcaatttcagctcatcaccaaaattacacagatagaagaatatagggactttggtgtacacatacccacttttgactccctctgattttctaatttagtagattttaattgaggctgagaactgtatttggaaaagttcattctgatgattattcaggtttgtgaaccccagtctagatagacctttatcagcacatgtataaggtgcactttgctaaggtgcattatgtgtcaggttcattcccactgtggaccagtaatttattcttgcccaaccactgctcatgacagatagatgatctctgtattccagaaatgaagctcctttccaattcctcaacaactaaaccaagcagaggaaaaagtggttttccttcacagccatagttccctgctgaagtagaatgaacgctttctaggaaactgcagcagatttttgatgacacggaaagggcatcactaggatcctcattatatattacctctctccctcacccgaaccacaatgttgacggaacagatacttcctgtggggaagatgctaagcagtcctgcatggctgtaggcattgtccacatcttaatcttcagctatatctgaggtatgacaagtttaacaatcctacaagttaaagcgtcacaccggaaacctgtttattcttctcccatgccaaataattccagcacgatgggtttcatctatagacgatgagaagatgccattgtggggtgaggacatagagaagagaggaagtttggaaccagtttatttctatttcagcaagcttaatgtattgtaagaacattttgtggcagatgaccctagtctgtaacaaggaatcgattgtaatgcatcattctgccagtgtttatctgttccctatgctcatataaacacacgagtcatctttctgcactcccaacctactcctaaagcactatacagaatgtttcgaaagcagaaggaaaagcagctgttccatacaccatgttcctgctgttcaaggtgcacatcccatccaaatgaatcatatcagagccaaagatcctggtaggagttcttttctacaaaactgcagtcttgtctatcctaacaacttggaggacaaaatattagaaaaccttgtaataaccttaggacacaataatgtagatactgactgagctagacctgaggactttttcaatgtagtgtggataagtaagatgacaggaagccataagcatactgtgccttgcacatcaacttctccagagccatgacaatcatctggagtatttgtgataaataaatattgttaatcttcatgtaattgggtaggatgaaaaaggaccagtcgtcccagacatcccaggagagaggagcatttttccagttgctcagatacaatttcaagttcgaaccaatatgaattacagttgaccacagaggccggcaaaatccatggcactgtagtccaagagaacctgaacactggccttagagtattatgagcctacatcacagtagaaggaatccagcagagatctctaatgcacatcagaaaagcaccatttctagttatcaaggctgtatttcacactgcttgactgaagattggaaactattttattcataggcaacctgtgtggccatccttacctggtctataaaaggaagtgtgatgaatttgcttcccatacatcatattaagtccagaaagccagagatgctgtgttgagtttctttcctgagagtctgaattcctaagtagagggactaacgagttccaaagttctttcactctgagatctttgtcacactactgtactgactggatatcactgaccttatttaagaggactatcaactggctagttcatctacattgtaaggactagtttgctcacaaccaccaacctatctgtaattggcctcagtatgctctctctcacttgggtacttctgtatttggctaattaacctataccacttggcttagaagcaccagctacattttttctaattttgacttctcatcttttccaacttgattttatccccagatttggacttttgtctcatgtataaactttatattttgcttgaacatgtggtctcaatgctgaccaagtcatccctagaatctgattctgtctcactattccatatcaggagacagcgacttaaatattttaattatttcctgtatcaataaattattcactgcctaaagtttagactttaataatatgaacacatgtgcagtcaaagagtacctcgccattgggccggaaaaatttcactgacttagggtggctcctgaaggtaccttgagaaagcttggatatgatgaatcctgtagacttattttatgtttactgaataatgcttcattcactttctttttgaagcttaaataaagcatcagtttgctcctgtcagggcagaagaccaatttcacttgtctacccatgaggataaatggatgcagcaagaatccagaaatgtcttagatatattactctatagctcattgaccattctatcaatgctcaatgctttacttgaaagtgatggctatctgatgtcaagttccattgataaaatgattcccaaacgttactttcaagtatgcttccttcagaggtcacagaagaacttcagtaacctgctaaaacctaaaacaggtgaagttcctattaaccatgacaccaagagttttcacatttatattctttcctggtaaagaaaattataggagctccatgctcacggcttttgagttttctcccaggtgtgttcaaacctagtgacattaacaaaacataaatctagaagcctttcgtgaataatgtaaccttctttattttatatttaaaggatatatatgcagacatgtacacatctttgtaattatttaccgcctatatccctattaaatacattaacaaatatgccacaggaaaaaccactgtaccaaagcccctcacaagagttatatttaaagtgggttaaagcaacatggttttaatttacttagtctttcttgtccaaggaacacagtgtgagacctcctttctttaggaaaaaataggatgaactaatttgaaaacaaagaaagcaacaaagtgaatcttgtgatgagctatgagcattggtaaattatttcttctgttgtaaattatcctcttctccctctgcttttctcttaatctccatttaattcccttttcaaaatcctaactctattctttttggaaaacatttcattaagctggtataagcatatctagacatctggaaatttttgtataacttttaaaggatctattacttaacaccatatgaaattatggaaaataaagtgttcctatctaatcaatctcaaagatttttcaagtgtacaatacaatgtgtgcttcaagtgtcagcttcttttttttttttttttttttttttttgagacagagtctcactctgtcacccagactgtagtgcaatggcacgatctcagctcactgccagctctacctcccgggttcacaccattctcctgcctcagcctcctgcgtagctgggactacaggcgcctgccaccatgccaggctaattttttgtatttttagtagaaacagggtttcaccgtgtcagccaggatggtttcgatctcctgaagtgtcaacttctttaaggctgtcatcttgccggttctaaacaactaaaaattgtaagaaccaatttctgagacaaatagaacattcttagtggtccttaaataattcctgatacttttatggcatgcttctttaaagaccttagaattatgcttcaggaatttaaattggttgttcagcaaagttaccaatcagtaggcaagttgttgcatttgacaggagcaatagttttcacgtggattatttatattcatgtatgttggtagacggatataaaacatgcaacttgcagttgcatgagacaaaagcatcaacatatctatcttagcttttcaatcatgtgatactactataatgctccatttttcacagatatttcttaagttctttatctcttcagacctcccgtaaaccattttctgtcttctgctggaccacattctagatgatctggatgtctatcattctcctttgcctttgctttatttgagtaagtgctgaattcgtggactgtgttagtagtttgatgcgtagtttcagccagatagatcagaaacatgaaatgcttttacatcatccaggtagatggcgccatgaatagatccctttgctttctggcctctgaggtaataaagacttaaatctaattgggttcagcttaaaatctcaatgtcatatttaatttaatatgcttccttgtttccagctcaagcttaagccatggtctaaaagactttctctggaaggcaagtgtggttagattccatcttacacctccactgcctctttttcttttttttttttttaactgcacttcagttatattattctccaatgtcttgggaagtaggagttaaggaaaataggcaaatgtctcctgttaactagctatttgtagctttgagtttatgatttgtgtgtgtgtgtgtgtgtgtgtaacagagatacaaagttcgggtttatttggggtacaagtatgggatctttaagaagtcttgcagaagctcttttgttttccccatctttaagaaggaaaatatgctctataaaaacatcttcaagcctcttgatcctgaggtactcttgctccataaagagtgttcctggtagatagctcaaacatggctgtcttcttccacgttcacttgacctattgagaaacgtttgccacaccaagcactggggagtacaggctgccccccttcttcactgtatcatttctcattcattttttacctatcaagtaggcatataatttctgaagcagacatcttcagaagcagagttggtaattaggtgtcatccctatctactctggactcccagaccctgtgatcagtggtcttggagctccacttacttgcatgggacaaaaaggttgaagtaccatcttcttttcccccttacggaataaacagagggagccatccctactctccctctgggccatgaattcagaagaccgattctttctaaaaccttcagagagttttagtataagtgggtatggtggagcaacaaaggcagggccagttttcccagctcttttgtaagccctttgctatgccctgctatttccatctcttagaatgagagagacttattacttgttattttcagtttaagactatacccaaaattctaagacaacagatagaattcaatgcattcatatccatagtgacagtttcacacttgctcttaagttaaatagaagagttaggtcaggaggaaatagtttatcaaaaatgatatacacccaccagtattcttagtacttggcacttgaacaaattgcaacctgttagtaggtaaaaaagaaacactaaaaggaaatagttggaccactgaactattgcttgatccactgaagcaagtgttgcttggtccactgaagttgagactctgggaaagaaaacttgactggtaaactctgtgaagtgaagcgtggttgtcaaatggagattaatgtcctctcatgggtctccactgtagtttctgaagggcaggttgagtaggatttggttttagcacatctcttgcaggactcctatcccaagacactttctataaaataaaacatattccatattgctctactttctgcaaggtacggacagtcaggttggggccaattaatgcactaccctaagcagaaacttcaagactttgtcgttgctttgctttatttgaattggaatttgggatttagttttcgttagttcatttactactaaaatcactcataaaaatgagggctttattttgacattggcaaaaatccttctttactcagaagaaaatatttaaaactgctggaaattgaaatgttttacatgtctacatcacaatgatgaatacaatgatgagtatttaaacaccaaaaataaaagtgtcttattacgagatgattgtaaacagtgcacccacattcttaatccatttgcaagcataagcttacccatcacctcataaatgcagtaaaattgctttttgtattgagtttaataagtatagtataggatacctagctcctttaatgaatgtgttttttgtaaaatattattaaatgattttttttctaatttggctttttaaagcatgcattcatatgttaaatacattttttggtttcaatattcggttttttatttcacatgcagagttttctcttccagagtttcttagacatgctacactttgatttatgtgtttgtaatattgtggtacaaaggttagtacattatttttaaaatggaaatgtgagaaactgtcaattcattgtagagatgactttacattgccagcaaaactcattaaactcttaaaactttttcttaaacttattttatatttccatagtactttaaagatataaaataattaatttgtgttaacttttacttagttttaattttcattgaaaactgggttaaaatatattatgtgtttttcttggtaaccattactaggattgttttctatttttatatttttgtcattgatcgccagttattaaaagatgtctttctaactttccttatatttgctgtttctgtctagctatataattcctcttactgctaagtggattagctaaagacatgaaataacattttaaaacaacagcggaacagtattctggaacaacaacaaaaaatcagattatggttgaagactttctacaaacttcattcaatgagacagcacaggtcaagcgggcagaaagtcagaaaattcataagcctgacattccatcagggtgcgcctaatcagatgtttagaaatagaaggcagcttatgccatgactagttgaaagaattctgcaagcttgcattgacatgaggtcttttcaatgactgagataatcaaggaatctgtgtaaatcagcctctcttattgactgtcaggccaggaaaagagccaacccacccgaagtcaactctgccatcatttcttaagccacactgttcctttcagctcatagaatctcatgaatagaaaaagttaggtttctaaaaagaattttgaggctagatatgtggtttaatgttattctatattacatcctatacaattaaaatctacagatgtgccttgtagagtacactgtttttgcctttagccagaggaaggaccaaatttaatacctggctaggcaattattacacgctgtgattggaagttttctccaaccacctgtcacaatgctgaaattttatcactagagatccatttctttggaagagctgtgggtaggctgcagccagtctcctctgcaatagaggctctgattatagccctgaacactgttatctgaaatagtaaattacctgatgtaaattttagttgaaattttgactgagaacaaaaggaagctatgtttgaattggaatatagggcaaagcctcggtcaccaatcttggatacagaattttaatagaaagagattaaaattttctccaaataatgtcccacccccattctgacacttttaatacaaaaacagatagatttattgtccaaaagatacatctctgagcagtggtgacctttgtttacaatttcttctgtaaatccattttcgtctttgactatttaaagttttctgtttttctcattaaaatttctccttatacttttcacccagtcataaataaagctattgggcttcattctaggaactggtattgagcaatgaacaggacagccgtaatccttgaactcattagagttgatagtctaaagtaaatgcagaccattaatgggagattaaatatgttatggcacatacaaagtgcaagaaagaacataatgtcatgtgagggaatgcataaatagcttaatttagccatcccgtaacatattcatatattaaaacatcatgttacgtgctctaacttgatagaatttttacttgtcaaatcaaaaaaatacaaaattcaaagaacatgcaagaattacctccctgaacttagaaggtgccagaggtagccacttggaagagatgtccactacattaagaagataaatgtaaattagccaataaaaggaagtcagaattgagattatgccagtaaaagggaacaacatgtttaaggccaagaatcaagagggccacagtgtaggttgggaaataaaaaataaaatttctgtatagctagagcagggagtaaaagacaccagcaggacttatattatgaagggacttttaagccacattaaggataaagcttttggctgcgcgcaatgtctcacgcctataatcccagcacttagggaggccgaggtgggtggatcatcttaggtcaggagtttgagaccagcctgggcaaattggtgaaaccctgtctctactaaaaatacaaaaattcgccaggcatggtggcaggtacctgtaatcccagctacttgagaggctgaggcaggagaatcacttgaaccagggaggcagaggttgcagtgagcagagattgtgccactgcactccagtctgggtgacagagagagactccgcctccatctcaaaaaaaaaaaaaaaaaaaaaagaatagagcttttatttgaaggacagtaaagaatcactagagaattttagacaggaagccccaattcgttattgagagaacacattgcagctgctttacaggtgggatgtggcagagtaaaatgccagtgaagaaactgatagcatatttgaggtaagatatagtaatgattttaactagagtaaagacaatggagagagagagaaaagattggaatcaagaactatttagaaggtataataaataattagtgattgactgattagatgcaacatgatgaaggacatgatagaggaagtagaaatatctagaattacatctaataaagggaatcattatttgtttttcgctgaaaccggaaaaaatacagagaaggaggaaaagcaagttggggagttgagaagtaggtgagaagagtatatgcaaggagttcatgtgtgggagtgttagcttttggtggttgcagaatattcatgaggagatgtccaatagggtgagataacatgcaagtatggagatcaaggggagatctggacttgagagatgtagagttgagagttgtcagaatgtgaggaggaattgaagttaaggtatgggtagaatgagaagaaaggaaagcccaggataaaatcttaatggagtcaaaatttatggtacagggagaagtactgggaaagccttccctcttcctgcagcatcactaaacttcctgttcttttgccttagtctagatgcctttaactgtagttttacttgggcaaagctgtgttataggctggcttcactgaagaataatgacatcactaatatttttaaagcttaaaaagtatagtatttatgtaatatctaatattctatatataatataaaaaccaagatcatcttaaaacctcagtcatgctctgtgggaaagaaagttatattgtacctgataatcatgcctttacattgtatattaaggaaatgtattttaaatgacacataatgaattcccaataagttgcctgccctatttcttacttttacaactactctgttaaaagtgaacagatccttgaagggagactttccaatctgtgcagcatggtatttatacttgaacattattgaattatcctaatcatacttatagttacaatcaagattaattgcagctatattaggattacttattattttttctacttcagcagtaacataaacccaattgtacaaacaatttctgtaatccaaattgtgaaagaaagtagggagaaaaaagatcatgcaaagctggttgaaatagtattcaaaataaatctttaaccagactgttatctaaaattctgtttttgacaaggagctgattctgaacagattgtacatgtatctcactggtggaagcagattatctgtcttgaattggattgtgatgacgatgaccctattctaagcaaaccaaatctcttgaactatataatgagatcaggaggaacattcgacctgagaaagacagattgcaatgactgagatgattttgctaattttttttccagcctatttccttaatgtacgtgatattgtgattgattttcatgcagagatccctgatcctatagttttgtttgctatttatttttctccttcacattttttttctatcaacagagctgaatgagtgccaggaagctgcgaaatctgtcttacaaaaaggtgattgtggaagagtctagaatcttcatttattgttcagcaggattacagaaaagctatcaagagtaaacatttaactgatacactcttattccttctttttaggctgtaaggaggcaaaagttgcttgaacagagcatccagtctgcccaggagactgaaaaatccttacacttaatccaggagtccctcacattcattgacaagcagttggcagcttatattgcagacaaggtggacgcagctcaaatgcctcaggaagcccaggcaagtacatctgggaatcagcttccattcttttgtttttattacttcaacaaaatgttgcagtgtttctaactttaaatttattcaactagttttccatggggttgttttgattcactgatttgactatttggaggtaggtaggaagaaaagggggtctagatcattagtctaagatttatttttttaaggatgtaatggaggaatttgaaataaagacatttcaaagacaggagcaatacgttctggtgtttctgacttcaaactatactaaaagctagagtaaaaccataggatagtaaatggtaaagaaaatgttttttggccgggtgtggtggctcacacctgtaatcccagccctttgggatgctgaggcccacgaatcacaatgtcaggagttcaagaccagcctggccaacatggtgaaaccctgtctctactaaaaatacaaaaattagccaggtttgttggcacgcgcctgtaatcccagctactcgggaggctgaggcaggagaatcacttgaacacgggaggcggaggttgcagtgagccgagattgcaccactgtactccagcctggaacagagcgagactctatcttataaaaagaaaaaaagaaaatattttctatggcattgttggaaagcagtctcaaacattttattataaactcctcgtttagtcacatggtctatattgttttataaaaatgtgttagttacaagcagtgagtaacacaaaattatcgatataaatttacacctcaattattaatgatcatgctcaatatagctacatgcactcactcccatgcttcattcaaacgaaaatataaaacgtgtttacctgtttttctagaatgagaattaaaatagtgttgaaaataaatctgagttgacttttaaatgagtaaattttaggccataactaaatttacattcactgtaagaagtatttttaaaatgctgttctcattttttaattaacatttaaacatatgtgaagttatcataggtattatttattcaaaagtctttagggttgtgtgatcgcaattactagatctgcttttcaaatcttatatacatgttgtgaacccaatcaccaagtccatgctatgatgagaggagcactagaaggttagctgcaaatctcaaagccttctccctgccagttggtgaagatgtctgaagtttttcactttaaaatgaatttgggggtgatatattagatttgtagatcatggttacaatgcaattacagttaatgaatcaccgttaataggtgttctgggcaacagtatacacaatagcatgagttaatttaccatattgtctaactttgaccaagaatgtccctgataatatgtggcagagtataggtagttttgataggcttaaaaagtccagggaatattatttccttatggagtgcatacaattgcaatagtggatgaagaaagagaattttggggagaatcctgatgataaaatcctcatcatagttttccactgggcaacaagagtaaatattgtagtagaagtgagggataatagtaaacatacttgaggattcaatttttaatttgtcttgatatataatgattgtacatattttagagggtaagtgtgataggtttatacaaacctactccagtatatatatttttcaaacttacacaagccaggttctctagaattaactattcctaagtccgtcccagtttgagtcataatgaaaaaggttttttgatataaaatatttatacatatttatggatacaacatttatgtaatattttcttacatgtatagaaagtgtaatgatcaagtcagggtatttagtgtgtctaccacggcagggtttagtaaaatgcatgataggaatgagtaattgtttctgaattgagaagaactacatgactataaatgaaatacagagtagaactgctttcatttaaactaatgacatgagttttgaaggaatgtttgattaaaaatgcttgtgacgttctgaatggaattaaggaaaaatttgagcagtatgaatactagacattaatattgcaagtttgtacttcaaaatgcataaagaattactttgtgacagacttgcggaatgaaattatgagtagcaaatttgataggcaaagctattatactattgtctttcaaggaaaattggagcttttagggcgaagcatctttagttgaacaggttgtgataaggggcactgtgtgttttttcttatttagaaatggattcaggattttataaacattacttgtttttaatagcaaaatattttgcttggtttttctaaaaaaatactacaataaaaatgttattaactacatcagtagaaaagtactagtaaacagcagaacacagataaattatgaaatttcagatctacttcaagaaagagattttgggcattcagatcaaatctattttccatgcatttcaggtcacacctgcattatcaacatagttcttgacattgagtctccccaatggtaatacataatattggagaatacaagccatctgaaagctcttaaaacattcttctgctccagggttttattttaatatggcagtaagtgaattgttttctagaacagagttctcaggtactcagatttgcttcaaggattatatttcctgaaaagcagctcgaaattcccatgaaataaaatagagagtcaaaagttagatagtgaaataacataagcacagtgtgtaagatgaaggatccactaagaatgccaccaaaatgacattttaaatatagagatggggtggatagatggatggatgtatggattgatggatggatagatagatagatagatagatagatagatagatagatagatagatgaaagaaagaaaagaaaggaatagaatagggactaacttcaatgcattgtattaacaaaaatgtgtttctataaatttgcacttaaagataaaaaggttattgctaattaaaatattagtgcactataatttcttttctcataaatggtatatttagcttaattcatcacggagaagcaggaaaaaatgtatgaagttaccatattaagtcctctttgaaatacctgctcagattttctgtcatatactggtcacgcagatttgtgggtgtctgactccaccgtgtggtgcactgagagttttgctagttaatttgaatcttttagagcattattttttctgcattttaagatcgtttgagatcctcagatataaaagctatggcactaaggaaatgcatactgtatgtacaactttctgacaaccatactcttgttatatataaaagtagatgtagatcaggatgcttctttacattcacattggcatttattactataggaaagaaaagagctgctcacttccttagtgtgttaattgatcagttatttctctgggccctcagattctgaattggatttaaaattatgttacttattttagtgacatgagcttacctacagaagcaaagcttacacttttagaaaataaagctgcatgctgccaggatgtaacagcatgtgttgacctaggagtattttatttcaaaagataacacttagccaattcacagtctttttttttaatactttaagttttagggtacatgtgcacaacgtgcaggttagttgcatatgtatacatgtgccatgttggtgtgctacacccattaactcgtcatttaacattaggtatatctcctaatgctatccctcccccctccccccaccccacaacattccctggtgtgtgatgttccccttcctgtgtccatgtgttctcattgttcaattcccacctatgagtgagaacatgcggtgtttggttttttgtccttgcgatagtttgctgagaatgatggtttccagcttcatccatgtccctacaaaggacatgaactcatccttttttatggctgcatagtattccaaggtgtatatgtgccacattttctaaatccattgtatcattgtgagacatttgggttggttccaagtctttgctattgagaatagtgccgcaataaacatacgtgtgcatgtgtctttatagcagcatgatttataatcctttgggtatatacccagtaacgggatggctgggtcaaatggtatttctagttctagatccctgaggaatcgccacagtgacttccacaatggttgaactagtttacagtcccaccaacagtgtaaaagtgttcctatttctccacatcctctccagcacctgttgtttcctgactttttaatgatcgccattctaactggtgtgagatggtatctcgttgttttgatttgcatttctctgatggccagtgatgatgagcatttttttatgtgtcttttggctgcataaatgtcttcttttgagaagtgtctgttcatatccttcacccacttgttgatggggttgtttgcttttttcttgtacatttgtttgagttcattgtagattctggatattagccctttgtcagaggagtaggttgcgaaaatcttctcccattctgtaggttgcctgttcactctgatggtagtttcttttgctgtgcagaagctctttagtttaattagatcccatttgtcaattttggcttttgttgccattgcttttgttgttttcgtcatgaagtccttgcccgtgcctatgtcctgaatggtaatgcctaggttttcttctagggtttttatggttttaagtctaacatgtaagtctttaatccatcttgagttaatttttgtataaggtgtaaggaagggatccagtttcagctttctacatatggctagccagttttcccagcaccatttattaaatagggaatcgtttccccatttcttgtttttgtgaggtttgtcaaagatcagatagttgtagatatgtggcattatttatgagggctttgttctgttccattgatctatatctctgttttggtaccagtaccatgctgttttggttactgtagccttgtaatatacagaaaaagagaattttagaccaatatccctgatgaacatcgatgcaaaaatcctcaataaaatactggcaaaccgaatccagcagcacatcaaaaagcttatgcaccatgaccaagtgggcttcatccctgggatgcaaggctggttcaatatatgcaaatcaataaacgtaatccagcatataaacagaaccaatcacaaataccacatgattatctcaatagatccagaaaaggcctttgacaatattcaactacccctcatgctaaaaattctcaataaattaggtattgatgggacaaatctcaaaataataagagctatctatgatgaacccacagccaatatcatactgaatgggcaaaaactggaagcattccctttgaaaactggcacaagacaggggtgccctctctcactgctcctattcaacatactgttggaagttctggccagggcaattaggcaggagaaggaaataaagggtattcaatcaggaaaagaggaagtcaaattgttcctgtttgcagatgacatgattgtatatctagaaaaccccattgtctcagcccaaaatctccttaagctgataagcaacttcagcaaagtctcagcatgcaaaatcaatgtgcaaaaatcacaagcattcttatacaccaataacagacaaacagagagccaaatcatgagtgaactcccattcgcaattgcttcaaagagaataaaatacctaggaatccaacttacaagggatgtgaaggacctcttcaaggagaactacaaaccactgctcaatgaaataaaagaggatacaaacaaatggaagaacattccatgctcatgggtaggaagtgtcaatatcgtgaaaatggccatactgcccaaggtaatttatagattcaatgccatccccatcaagctaccaatgcctttcttcagagaattggaaaaaactactttaaagttcatatggaaccataaaggagcctgcatcgccaagtcaatcctaagccaaaagaataaagctggagtcatcatgctacctgacttcaaagtatactacaaggctacagtaaccaaaacagcatggtactggtaccacagtcttaaattaaattatatggccacagcatcaatctacccagtgtcagctcatttaatgagagattttattaaagtacaaaattaagaaaagatttattgaaacagaataaagcaaatggggaaaactcttctagatatggaaatatatcttagaaaacagaaactaggattatttccaaagtactatgattaaaaatgtaacaacctatgcgtgttccttggaaataaataaaaaattaaatcacgaaattgtgtgactgcaaagaaacacatggaacaaatttagtcatttactgttcaatttttcagaactatatattgaagcacagagtttagttttggcacctaaaatcctatagcaacagtctaagtaaccatgctgagccccggagcaatcaaatcaaatctttaggtggatttggtcttcagaatttttggaaacttttttattcattctaatgtgtagctaattggagaatggctttggatggttccctactagtaatgactaaattgttccagagtatttttcatacgacattttctatcactcttctataaagattctcttctatgactgtgtcaacgtttcaatgggagggagtcagagtggcaatcaaactactggtgagattctctcctattttgattttttcctctaatggaaaatgggtgatggaagaaaatatagctgagagctatcgcacaaattttaatttagacaaaaagaatgttcaatatagatgtttgaggctgaactctgcttggctttcttcaattcatttttttctaaccccatttgttaacatgtcaattaacttgcatatggctcttaatcattttaggggacagtgacaactatgtttaaatagctacttaaatgtcttgcaatttttaaaattacaaagatactttcacatacatgatttttttccttttctactaattttagttttgaatctttgatatgtaagaacaacccaacatgggcacctgttgaaagtcaccatgtccttatgtgttgatgcacattttgtaggggaaaacatggccctgttgcttaaattactgcaagcaagagcggagttgcttagcagtggctccagtagctttactgttctatttgttttttcccaaagaattctgatctcatttttttgtaacctcgtgtcccacatagtagatttatgagcaggaatagaggaaggaaacaaattaccttcaaagaagagtgcctcataattaaatattgaaaaatactgccgtggtttgctcaccaagctaggacgtcaggtgttccagagtccactacagaccagacttcctccttctctttttccctcccattaacaatgtgagtacaatttagaaaagaggggatttttaaagcaaagaaagctattaatttaaactaattacgttaaatgcactttaagaagaattcgtaattgcaatcttcccgtgtttatcaaagaagctaaatcttataactcacattaaatataatcggtcatctttaaatgttaacattccaagctatcaaaatcaatggcttaaaaataaagatataactgcagattttggtctatcagattgagcttttgatttcattaaggaataaaacagactcttatagtgtaaataggcatatttgattgccaaacgacttggaacagtgtaactttacagtctgctttattgatttatgagttagacagcagaaacctgcaaaggggaatttatgtggtaattggataatttagtcaaagaagaaaaaaatggagaactaacccagagatttgggttcaaatattaaaacctatctagccatagatgtagactttttattttctttttacacagcccagtagatggtaaacctagtgcatttaattttgaatctgttctaacattgaaaggccacccctatgtgttgctatacagaacttattactctccatttaagaataacttgttagtttcatatgtttaatagtgtgggaaacagtcataaacacaagttgtaggaaatgtaaaatactagaaacttgccacacgtcactgactgtacttggacaacctgtacattattatgtcctcactggctatatgataaagatatagatttctttcatattattttgatgtgtacattttaagactgcaattaaactatagtatgcttttgtaaaaatctatctacaaattctacatataaggatgaaattattaaaattaatggcaaaaactgcaattacttttgcaccagtctaataacttcacgctacagccacagtgaacactattgcaacactctgaatattttgaagtgatccaaatttatcctattatttcccaattttgtcttatgcaaatgaatatttacttcaaagatagcacacagaaaatttatcgatctaaaatgcacagccagataacacttagcataacatactatgttttatttttctttcagcgtttatcgtgattgttaaatcttttatttgctttttaaaaattttccccgtctattcccattctctaaccactaaagttcagctgtaagaccgtgggccacccagcagatttctaacaaatagctggcaaatttattgaattccactgaggtttagtcactaagtatgtgtcagacaaatgtgataggcagtgtaaaatttaaaatgtgaataagcctaacgtggtccttgccatcttgccactcattagatagcaccaaagaaagataaaatttagaaattgctggccacttacgtttaccataatagtgaagaaccatttttccaatggaacttaatagtatcataaagacttcttgtcataatgccttatgattgcccaactttgaagctctgaaaacctttccaaaatactttgaatagtataaaatggaactcttcacatgaaaaggaaagactgatggaaaatatatattttagcctctttatgtattacctagtttttaaggattataccatgtgaatatctaatattttgaaagcattcacgttatttggtaattacagcagcctaatgaagtataaaagttgtgtttaaaagggaatatttgaaaacactagatgaatggttgaggcatgggttgagaacaggatgtgaatgaaaatggacacacaggtttaggggttaataaaaaatgtcctaaagttggattgtggtgatatatacatgactctataaatttcctattgttcattgactatatgtttaaaatgaaaattttatggtatgtaaattgtacctcaaagttgtttttaaaaccctattgaatagagaatatatcaattactattatatatttaaaaagataatttaaggttaccatcaactttttcactccattattttgatgcatagcaaagggtgaaatgtgatgaatgttgttaaataacctggaattaacttaaatggtagatatttattgatggcctactgatgtccgcaagatcttacatagtaatatcataatgttcccattgtttacattctattccatttaatgaattttaatgctaaagcatttttactgaagctgatattttaactcagatctgctttctccactttaataattagccctttattaagtgaaaattaacctagaagtacaatctcccaattatttctaggcagcattccaaaatgttccctagagtttgatttactcatttatctattttgaaaagtaaccataattacttgaaaatacgttatttctattttcaatgtttgtaggcacgtagtagatgtataaacgttacatgagatattttgatacaggcatgcaatgcgtagcaatcaaatcagggtaaatggggtgtctatcaccttaagcatctatcctttgtgatataaaaaattcagttgtactcttttagtttattttaaaatgtagactcaaattacttttttattatggtcatcctgttctagcaaatactaggtcttgctcattatttctaatttttgtacccattaaccatccccacttcctccccaacccctgactacccttcccagcctctagtaaggatccttctactctctatctccatagttcaattatcttaatttttagctcccacaaataactgagaacatgggatgtttgtctttctgtgactggcttatttcacttaacgtaataacgtacaattccatccatgttattgcaaatgacaggacgtcattctttttatggctgaatagtactgtattgtgtataggtaccatattttcttttttttattattatactttaagttttagggtacatgtgcacattgtgcaggttagtcacatatgtatacatgtgccatgctggtgcgctgcacccactaactcgtcatctagcattaggtatatctcccaatgctatccctcccccctccccccaccccacaacagtccccggtgtgtgatgttccccttcctgtgtccatgtgctctcattgttcaattcccacctatgagtgagaacatgcagtgtttggttttttgtccttgagatagtttgctgagaatggtggtttccagcttcatccatgtccctacaaaggacatgaactcatccttttttatggctgcatagtattccaaggtgtatatgtgccacattttctaaatccattgtatcattgtgagacatttgggttggttccaagtctttgctattgtgaatagtgccgcaataaacatacgtgtgcatgtgtctttatagcagcatgatttatagtcctttgggtatatacccagtaatgggatggctgggtcaaatggtatttctagttctagatccctgaggaatcgccacactgacttccacaatggttgaaccagtttacagtcccaccaacagtgtaaaagtgttcctatttctccacatcctctccagcacctgttgtttcctgacttttgaatgattgccattctaactggtgtgagatggtatctcattgtggttttgatttgcatttctctgatggccagtgatgatgagcattttttcatgtgttttttggctgcagaggtacaaggaggaactgataccattccttctgaaactattccaatccatagaaaaagagggaatcctccctaactcattttatgaggccagcatcattctgataccaaagccgggcagagacacaaccaaaaaagagaattttagaccattatccttgatgaacattgatgaaaaaatcctcaataaaatacttgcaaaacgaatccagcagcacatcaaaaagcttatccaccatgatcaagtgggcttcatccttgggatgcaaggctggttcaatatatgcaaatcaataaatgtaatccagcatctaaacagagccaaagacaaaaaccacatgattatctcaatagatgcagaaaaagcctttgacaaaattcaacaacgcttcatgctaaaaattctcaataaattaggtattgatgggacgtatttcaaaataataagagctatctatgacaaacccacagccaatatcatactgaatgggcaaaaaccggaagcattccctttgaaaactggcacaagacagggatgccctctctcaccactcctattcaacatagtgttggaagttctggccagggcaattaggcaggagaaggaaataaagggtgttcaatcaggaaaagaggaagtcaaattgtccctgtttgcagatgacatgattgtatatctagaaaaccatattttctttatccattcgttttttaatggacatttaggttgcttccaaatcttgacttttgtgaacagtgccgcaataaaacacgggagtacagatatttcttcagtgtactgattttctttcttttgggtatatacacagcagtgggattgctggattgtatggtagctctgtttacagttttttgaggaatctcaaaacttgttttccatagtggttgtactagtttacattcctaccagcagtgtatgagggttcccttttctccatatcctcgccaacatttgttattgcttgttttataaataaaaccatttgagttgaagtgagattatatctcactgtggttttgatttactattctgttatgatcagtgatattgagacccttttcatatacccgtttgtcatttatcttctttcaaaaaaaagtctattcagatattttgcccatttttaatcagattattagttttttcctatagagttgtttgagctctttatatattctagttattgatcccttgtcagatgggtagtttggaaatattttctcccattccatgggttgtctcttcactttgtgggttgtatgctttgttgtgaagaagatttttaacttggtgtgttaccatttgtccatttttgctttggttgcctgtgcttgtgtggtatggttcaagaatttcttgcctagaccaatgttctggaggtttctcccaaagttttcttgtggtagtttcataatttgaggtcttagatttaagtatttaatccattttgatttgatttctgtatacggttcaagatagaggtctggttttattctgcatttggatatccaattttcccagcaccatttattgaaggactcctttccccaaagtgtgttcttggcactttgtcaaaaattaggtccctgtagatgtatggatttatctctgtgttctctattctgttctattgggctgtgtgtttgcgcttaagccagtaccatgctgtttcggttactatagctgtgtagtataatttaaagttaggtaaagtgattcctccagtttcattcttttttgcttaggatatatttggctattctgggtctgctgcagttccatataaattttaagattgttttttctatttctgtgaagaatgtctttgttagaaaatacattattataatgaactcttctattatcgttgtcgttattatgactaagcgtaacatcgtttctcaggtatattacaagtaataattatacacaatgtccaattttttatttttaaacggttctgtggtcaagattacgcagaaaaatttatatgctttacttctctgctggagatttttgacccacttttttgtattttcaaaaataaaagtttaacctaaatttgataagaagccacagacactttttcctccagaaatatgttgatataccacaaaactcatatgtcaaggaacaatgtaggggagacactgaaatagactgtttcctttggcctattgcatatttctgataaaagtcaaaacttctttagctgacaaaatttaatttaaaggtaatatttttctaagtaactctacttgggggggggggtttaaaaaaagagtagtacaaagctgtgtgaatttcttctttttttacttgttgaattattataaagtataacctgaaacttttcaacattttttttctatgaaaataattatatttcttgcattttcctatctttggaaagtacatatcatcccaaatcttttgatatattttgtttctttcgttttctaagtacgtgtgatatgtggccatttccctttcttgaaaatagcaatttcaaaattactggctctttcaaaattactaatctaacagtggtacgttcctccatcaatcagtagtctcaacatgaagtattttaatatcttttactaaaatattttcttattttctctaaatttttcctttctttgacaccacagaaactccaataattatttgatatcattttcttcattctgttaagtactttagcctgctgcagtataattttgctggccattttctgttactatatatatgagaatggtttgatgaggtaaagcaagattttaaaaacagccctgctctctgctcagttaactgtaaagtcctatatttaaaatgtgattaatgtttgaatgattttttggttctataattttgccctttaccatattcaatggaaaaatggttaattcgatttcacttgttttattttcctactttgaatatatagtgctgtgaacatagttactgcatgctcaaatgccttttttataatggaatgttgagataagctcaaatgtcttttttaatataatggaaagatgatataatttgctttatattacttgactttgatgaagaaaatctagtgattctgaaaggtactggattgagaacacctcatagagcatatgtgagtgttcacatcagtatccgtgatttgctatgtcctctcactttgtttccattagagtttactgattttatacgaagccaggctgataatttcacaagaatagttgtatgtggttggcttatttgttttcttcaaatgcttactatccatatccccctagatgtatatattaggtgaaaatataactcaaattatacatccctcacatctttaggacaacttagaaatctagtagacaagtagagagatcattttccttcagattgaatcttctatccccaatgttttcttccacaattttattttctttcatcatattctcataatgtcaaaaaagaaaatgattacattgtctttttttatgagtgatttttacataggagattgttcttcccagaagtttcaataatattctgttatttgtacaagttacttttctatttcacaataagcctgcgctaaagtgctaagcattttttacttatgtggttccagaatacagttctgacgaggttaggtaaagtagctggtaaaagatatcctaagtacaagctaaaagttaattacaatttaaatgtaaattttgtggaattaatgtgtaaagatgctggcaaatatgtgtcatgcatgttttacagcttacccatagtagaatcaattggaaatataaagacattttattttataattttagtaatgaattgaattattattaatgaatatgttaagtatatttgatagcctttttccaaatctacttgtatgatgcactctggcaaaaaaaagcaaaaggataacatctacaaagtgttgtatgattcttggatatacacaatatatattaataaatattctgagaagttctgtggtatagacacatgttcatcttcaatttccaaaatatgtttaaccactgagttctttttaatgcataatctactcaatgcataaagaaaattttatctctaatcatattggaacagtactacaaatatgcgaatttcactagaaatgcctatacattatgataaaagtctcacttttatatgatgttcaatgatgatttttttcaatgttaataattttagtggtggcgacctttctaaaaacacagaagctcatcctcaacagtttttctaactatttaatggaaatatgtatatttcaaattccatggaatgctttgccttgagctccaaattgcccaacattcctctcacaggttacttggtccttcatgtcccctgccaacagataaaagtcgagtgtttggttatatgtaagctgttgttgttcctattatttatgacttatgacaacaatatgactcatttgggaaaatgtggaacttatcaggaaggcctgtgttgcagtgatcacttacgctatctttgctttgctttgtaatgctgagcttctagaatttccaggggcagtctttgaaaaaaaaaattataaatagaaaattaaatgctggtttatagaagggtctcttgcaagtgagaggcactgaaacttaaggttctgtagcttcatactaattcctcatctagatagtaattcttactaactcacattcagtctttcctcccattaaattaagcacacacactctgcatgccccaagcctaatctttgctagcttgtttcctacagcctaaaataagatcctatattcttattctctgaccctccaaaaccctttctcagccatatgctagttaaatcatgtaaatttcctaaaaatcaccagattatacagcagatattaatatttatctttctgatcacagagcatgggtttttctgtttttaaaatttttttaaattatactttaagttctagggtacgtgtgcacaacatgcaggtttgttacgtatgtatccatgtgacatgttggtgtgctgcacccattaacttgtcagttacattaggtatatctcctaatgctatccctcccccctccccccaccccacgacaggccctggtgtgtgatgttagtttttctattacattgcatatatttctgctttgtaatttacttatatatctacagtctgcctcttaaaataaggcttctgtaagtataggggcaacaattttgttctcactgtgtggaattgagtagtagaagctgaacgatttgttgaattaaattgactaaatgctatcaacatacgaataagattaaatttctttttttctcacaaatgtccatttggaggatacttttattttaaaatcataattaaagaggcagtataattgttagagggcagcaagtttgttacttcctagttatgttaccttgggcatgttgatgtttctaccttcatttgtacatgaagatgataaatacttatgttaatatgattaggagatggaattaattatataaagtgttagcacataagttcccacaaatatctgtggtggtgaggatactgatgatgatttcttttctttttttttttttttttgtttttttgttttttgctcttctttgaccactctggtataaaaggttaaaggactatgtgtatacttcattttttcctctactaaccttggaggctaaggggatggaaaaacttttaaatacatgtacacagatatgattacagatgtataatttgggccctctaccctctctgagtgtattcttatttttttaaatcagtttcctttcacagtctccacaattgctattgaacttttatcactttgatttaaattccaccttgattctctcctctcatcctcagcagatacctagggttttgtgcttacgaggaaatgacatgttatatcgctgataacttataactaaatatttgtgcaaataacatggacaggtatttttacatatactgtcacatctgatctttttgaccaaaaccaatgtagttgactactgaagaaatgagaatttctcagataagaaaacttcattgctggcttgctattatcattcttgggctagacatgagaaaatcaaggttcagaacatgttgatgctttgcccaaggtggcaagagagagccctgaaatttaaatcctggttactgttaacatgatttcaccctgatactctgagagcaccatgtaggaagcattcaacttcttgcgtcttcacatcttacttttgttttctgaaaaagagccacctctcctcctgttgatattttccgttggccctgagctttgtgcttcactctggttttcttgctttaaacaggtttttttaaaatcaagtttatcttcttacatttaaaaaaaatcactttatgtgttggcttctttcatgtagccttaaagtatgttcaagtctgattgacctgaattttattatgtgtggagacaaaagtctgcaaaagtaatttaaactatttttattagagtgctccttgatccttaatcaggccagcccttgaaaatacgatttctgctctcgtcatccacttctctcttctagctgcaatggtcattgacgagctcatgtaccctgattactattgatcccattgaacctatctcaaactgtcactgttgacctctctctctcattcttaaaattctcacatcaattgatgtgagattttctctcttttctagttcttcttttctttctctttgactgttctttctctttatttggtgcttttctttccatgtcagttaaatttgtgttctccatggttctctctttgttctctctttctgctttcctctaacgcttgaaaacactgaaaaaatacatattatacaaatgtaccctgtttccctctttctctctgtacagacacacatagtgattattaaaatgcaaactcacttcaacatactgctgatttacagtcgcatttcctccctatgaatttccttagttatcggatcaaatattagcaataaaactactgttatctgtgattatgatcaatttcaaattttgaaatttatcttcgtgatcaaaatagtggtaaccattcatttgggacataaagttatttaatacctgatttctacctacatttcttgttaaattttgccaaactccttatgctcttcagtgccctgtctccacaccttgtctctcttcaaccagaaatgcttttgtttttacaactcctatatccttgcgtatccagtatgcatatacagtatttaggactctcatttagaagtaacaaaattgaagtaactaaagcaaaacaaatgagagagaaaggtttttcatatggaaacaggaatgtgtcatagaatccaagggcagtaataaagttttgactcaagaagggactaatgcctgtgttttggttatttatgatagccatttattattcccactaatggttttgcgtgttgagaaagctcacctggatggttctcttttgtggtttcttatgtgattttagtccattgttgtctgatactatagtaacctgaatgctcaactgggctgaacgtccaagatcactcattcacatgcctagcagttgttggctgaaagccttgttgtgattgttgctgaagcacttatccatggcctttcgatgttacttagctttctcagagcataatatgttggatggattctaaaagggagcaccctaagaatgactgttctaaaaagatagacgtggaagctgccaggccacttaaggacttttgccataactggcacttggactatattctattggtcaaagcagtcaaagagtcaacccagatttaaagagctgaagaaataaacttcacctcttgttgagggagtggtaagaggagcatgtgctgtgggagctattattgcagccctctttcgaaaatgctatctacgggctgggcacggtggctcacacctgtaatcccagcactttgggaagccgaggcaggtggatcacctgaggtcaggcattcgagaccatcctgaccaacatggtaaaaccctgtcgctactaaaaaatataaaaattagctgagcatggtggtgggcacctgtaatcgcagctacttggttggctgaggcaggagaatcgcttgaacctgggaggcggaggttgcagtgagccaagatcgtgctattgcgttccagcctgggtgacagagcgagattccatctcaaaacataaataactaactaaataaataaataaagccataccgcattggaagccatcagtgtttttgttaccacctcactccctatgcatctacttctttcttctctctctgttcatggacctttgctcttcctcaatccactctgcaaactagggacttcgtaagcacaatttgctagtatatgtgacacaattcgaagcactcacagtttgaccagactcttctgtcaattctaattttctgagagagattctgatgattctctcttaacacaagcattgtgtgtattctgatcacccataacatggagttggccagaattacgtggcacagacatggttgttactggcccacctttttgaggaggattaacatttccaagatgaaaggccctagccataacccctctaaagcatctgttactcccagcaatgcttactaattattgaaagttctactttaacatcaactcccttatgacatcctccgtacaagcatcactccaccctgcatacttccatccaattttatagattctgtgatgtttcttgctctataaataacgtcatgcacctagatggatccctactcccagattctaggttcacgaaacatatcaatatttctcacacaaggtagttattcaaccaatgaagatcatcgatatggtaataaaataagatacatttatatgcgtatttgctctcatttgttttaaggcagaattctaactatttaggtaattcataattgatttgcctctataattgttaggattaatattctaaggaataatattgaggtacatctgtgaatttataaccttgcataaggagctccttaaccacttagtccatgttcttggtataattctcattactcagttcagggctatagttcgctctggaaactgctaagcaaaactgatgttatcttctaatgatatgtatcagaatttactccaattggtgtaaattcacttacactaatatacgttatgcaaaatgatctgcatgataatgttatgggcactctggtataatttagtttctgctctaaattataataatctaataatgactgaattttaaattagaatgatttgaccgctagctgattttgtatggatttgacagaaataaataaataaatgtattgtgttcgtgtccacatgctgcagagatccctgcctataactggctcagaaattcatatgttaaatgcagaatatactttactatagaacttgatcgaaaatgtctttattgaatatataaatattgaaatgttttatagttatctaaaattcacaatcagtatctgccggaagccatcaaatatctatcagacaaatagcaatacctgtttggggcatttgacttccatttcttagattcatagcttccctgaaatttaactgaaatatggcacataatgactgagtagactacactaaggccaggcacagtggctcacgcctataatcacagctctgtgggaggctgagacaggagaattgcttaagaccaggagtttgggaccaggctgggtcacatagcaagactctgcctctacaaaataaaataaaataaaataaaaagaaggtaattaaggagtattttccacatgcaattttctcattatatctcatccctgtcacagttggctgaatcttacagattaacatcatgtctttggtccgatttgagtgtgacttcaaagataaaacatatcaattctacatataatatataaattacctattgaaaatgatatctgaaatagttgatattgactcaaaatgattattgcttttttcataataatcccatagggaagaaataaatcgtttcacttggataatttatgaaagtaaaaaatatttatgataattctatttaggtgatccacctgcctcgacctcccaaagtgctaggattacaggtgtgaaccaccactcttggccaatttacggtcattttaaaggaagctacatggtagaggtggttgaggagagtttctgaatttcgtcttcttggaaagttagttgttctttgtagagcatgctgactaataatgctatcctcccaacagaaaatccaatctgatttgacaagtcatgagatcagtttagaagaaatgaagaaacataatcaggggaaggaggctgcccaaagagtcctgtctcagattgatgttgcacaggtatatgttatttcagaaactaaggaacgtgttttcgttgggcattatactccagtctatattggacaacttgattattggcaagattggatttgaggacattatttgaaaactataatttgatgtctaaacaatgagtgttttgctctctacattttaaagataaaataggttaataaattaccttttatttagtataacattaagaaaaaactactgaatcattctcccaaatgtatgttttcctgtgttggatgaatggaaaaatactgctttattttgtttttatttttctgtatatcttcagaaataaaggcagatctatcaataaaaataggaccagttattgtttgaaaggcaaaattaaatcagtgcctttttacactgtccttacagaaaaaattacaagatgtctccatgaagtttcgattattccagaaaccagccaattttgagcagcgtctacaagaaagtaagatgattttagatgaagtgaagatgcacttgcctgcattggaaacaaagagtgtggaacaggaagtagtacagtcacagctaaatcattgtgtggtatgtatttctggtggcaaatacgcaggtaccccttgactttcctcattaagaagtaactgctcttttataagagagaattgttttcagataaccataataattatactatgtaattttaagattgagaacaaaaattggcacatgtattgtggcctattctgtgtgtcttttttgagtctataattctgctaagaactgtgcagaatataaaaggatgttgcttgtgtttaatttttatgattctttaaatatattttaaatggaaatctagaaaggaaatatattaatctaaaaatagtaacaacaacagtagttgcaataatcctaacaacttcagaaataatggatgccaggtaaactacgtgacatacagaagtcacctttaattcttaaggctacagattacctgagagaatttaaggacaaacagctggtgaatggcaaagcaagattccaattcaggtactcttattccaaactttaataactttcctttaaacaccagtactggatatacagtgaaatgcctcaagacaacaccgaattaaaaggcatggaaaggtacaaatagcctaaagtataaatctgatttaaactttataatattgaacggtgtcctatgttgctgttattggaaactcaccaactgagatgattcctctgaaaacaaagctgaggtatgattgcatctactcgagtaacataagtattattataactctacatgtactatcggccattagagtgggaagtcacataaaatgaaaacacagaatgttattaaagggaaaacaagtctatttagtacttgatattttaagtattgtttctacatctactccataatatcaatgaaaaacagagtccttcagatacatcgtagtcatatcatgaatggggaaatatttttctttttaacaaatatcttaaaataaatacatatatttatgtgtgaaaaatatgaggtattcttattcgataatatattttcataattcaagctgcattttagtggtataattactttaattattctcacccccaaaaagaaacttggaatagaaatgatagaaagtagttagttgatattagatgagtaaggataggaatatatgggaacatatcccatcttaaattttgccaaaaaaaaaaaaaaggaaagcataaatgacccaagtgccttattcatgactaatatttgcaaagtgagcacttttcgttcttttctagaaacaggtctctaatgttaccttataaaatgtatccaacagtaaatatgagctgaaaacaatctcacctgtgtcaagctgtgactgtgccctgcgtcagtacaaaggaaactgctcaaggcatttgctcaattggtttctggttctggtttaaatgtcaggaccaattgaagcagttctttcataagaatatccttacactgtttagttttttcattgtttacgatgctttgtggtgtataccataatcatagtcttgccttcaagacatgtttgtctatttataaaagtcttactttcatgaacacaaatataaataatatttctcccctttgtttataaatattttacttgcctattgaatgaaacaatgttaatggctaacggtaccttgagggaactttcttcatcaaaataaagcatttatattttttgaagttcagagagtaaataatttagaaaaatctctgattccaaattagcatcgttgatttccaacataataattaatttcagtgtttccagatacacagatatttttatatcttctaagaaaaaagtaaaatgaagtaaataatatcatctgggaaactcagacaaaagtcataattattagtgatgaaggaatgttaacatcatttgtcaaagaggattaatatggaaatatacatgtagcattgatcagataattgtccagcctttacaaaatgcttttttttagacattacttttaaactgaaaagagaaattaaacccaatttttgttctaattccataaaaacaattacctactgtcaggtttattttttggtaatactaaaataagtactgatagttcagatttatgactaaacaaattaaagcagagatacataatgtaaactattatatatacgtgtatacgtatatacacacacgtacatatatttgaatacatggccacatacatacaaagacatatatttctaggaaaactacaaagcaaaattaagacatcaagtggtgttggagtggtgttggtggtataattgtgaacatagctgtcttccaaagttatgacacttgtcttatgatgcttttttatagcaacctatgttttgtgaaaccgtatgtgtgtgctttatatttgtgatgtacatgtgaattgtcaataatatttttatatctggttttcatcagcacttttaagaaaataaagttgtgtaatttaattaacattgaaaaggaccttactttcttatatatgatacaatatatattgaaattatgatgtagaaatttaggtgctttaatgttactaatatgtaagtaccatgagaacaatagtgaatgtgtgtgttttggccaccactgacttcccagtgattcaaatactatctgattgatagtaaccactcaataaatacccgatgtaggagtgaattaattcatccaaatttatggctagaattatataactccaacatttaaaatagaagtcatgtaaaattcagaattgacatttatgttctttgattgaagaactaaatatatatatatcacaaaacacatatatatgattaactctctgtttaataagaatagctgcaaatgacacatatatgcatgtgtgtagacaattagaaatattaaatcaacagaaaatgcaaaagctagatattgaccaccgctgcaaaatgctactctattaaaatttcaaacatggaatagcaattaaggggatctctatttatttctgttcataatattatgaaataatttaactctactgattatcatgttttgttttatgtttaaacttagaacttgtataaaagtctgagtgaagtgaagtctgaagtggaaatggtgataaagactggacgtcagattgtacagaaaaagcagacggaaaatcccaaagaacttgatgaaagagtaacagctttgaaattgcattataatgagctgggagcaaaggtgtgtgcatgctgagaccacaaacacttctttccactttccttataaattgtaaagcaacgggcaataaattatgtatgattagagtcttagcaattctaaacacctctctctctctatgtatatgtatacgtatatatatacacacatatacgtatatatatatatgtacacatatacacaaagataaacatatacacatatttcgatgtggaattctcattaagaaacaataattaatcagtgaggctctgcttattcagattgaaaaatacgtaacgctcagggaggtttttcctggtccatcagatagctctaaaagggtttcttagttgtaagtgttccttattttcattatatatatctacttgtgatgacttgaagactggtaaatattataaactgtatctatttatatgtaggtctaatgttgttaacatattccacagagaccacattaagtttaaaaattacacagtaattatttccctatatggccaagacttgcaaaatctaccacacttggctaataagatagcatggatagccagttaagacctacgtctctgtaattatttttgtatcattgtcctgatcagagtctcatgaccagctccacttcactgctaattcaagatgcctatatctctccatctcacttcgctcaactcaaatattctgtatagattatgatagtaagtagtctcttcactctgttgattgtttgttttgctgagcagaagctttttaggttgatgcgataacagtcgtctagttttcctcttgttgcctgtgctttgggagtcagatccaaaaaaaatgtttgcccagaacaatgtcaggaagctttttcctgttttcttcaaatcattttataggttcaggttttaagtcttgagtccattttgaactggttttttatatgctgtgagataagtgtccaattgcattttcatgcatttggatatccaatttctcagaaccatttattgaagagaatgtccttttttcattgtgtattctcggccccttggttgatcagttgatcataaatatgtggatttattattgggctctctattctgttcctttggtctatatgtctgtttttatactaccatcctgctcttttaattactagagcattatagaatatttttgaatcaggtaattatgatacctccagcttcgttcttttggcttaagattgctttggctattctgggtcttttgttgttcaaaatgaaatttgggattctttcttctacatctgccaaaaatgtcactggaattttaatagggattgcattaagtctgtaaattgctttgagtggtacagacatcttaacaatattatttattccaatccatgaatatgggatatctttccataaacggatatcttagtatttccaaaaatggacttctaacattttaatttcgttctgactgaaagaactgaatttcttggaggataaaaagttatatttttacaactcaggttctcaactttagtgaatagaacaacatcactgataaaattgtcacctcatcttagacagaaatatgaatgtccatgtttgagaaatagctaaggagaggcatatttcttgcatctcagcctgaaagtagattgaaggttatatcttcaagatattagttgccaattccttaccatagaaagtaaattttataattaagttgaaatctggaagtaatcatttttcttagatagtcttgtttttatattttaaaaaccctctaattaatatttgttatgttttaaacaagtttgttgccatcctatgacaaaagattctcctactttgtttcaaaataagaaacactgatactcaattgatgggaaagcattatgataatcttgaaataaaatacatttcaactgttcatttggtctaccaaggtacctttggaatgagatacctttatatcctctagagaaatttatcattgtttaaagatcaccacagacagaaaaattgtatctgcacttgataccttattccggtgcttatcaatttttatagatgccaattatttcatatttaacatcaattacgaaggactgagtaatctctagtctcaaatgtattagagattgaataatctctaatattaatcctaatgctacagcttcagttctggagatatattgtttttgtaattataaattttaaattaataaaatgaatgtatgttatagttataaattacaaattttcagtttataatttgacctgtgtgactttatactaaaataatgtatggatgagtattttttaaattaagaaaatatatgttttggtaaaggggagtttctcagtttactttttaaaatagaggttttttgtgtgtgggctttttatttgtcataggaatttttacgaaatcattgcaagagtaaatttaacataaaataacagaataaatcaattagaatttaaagcaatgaaagtgacattagacgaataatagtgccctgagttgattattattcagaaatgaatgattctcgtaatgatgtcaaaccctatttattcctgaaaatacatatctgagagcttgtgtttattctaaccatttgccacatagtaatatccttaaagcaaaataaaagtgtatgaagaaatcatatttaactttaatagtatcacagaatacagcaaaaacataggccaaacatttatttttgaagtaaatattgatgtagaaacatttgtgactaagggatcatgtataaataccatcttataaaaatgctgtaagtcctatattctttgcctgagaataaaaatattgtctggattttgactcaaaatattttcaacagcagtagctttgtctaatgaaagcaaaggcaacaaaggaaatgttattacattattctttttatgtaagaaggaacccttctattttaaccatcttcagaatttatatggttgtgtctgccacaattgagtatgcattacctttttggagtaatcagctctggctgccataacacaataaaataaactaggtaaattgatttctgcaagtgtggagtctgggagtgcaagatcaaggtgctgatccatttcattcctgaggagagctttcttcttgtcttacctttttgctgtattcttacatggtgatgagtggggagagaaaatataattaatttattaagagatattaaagctggcaccattgatgtaataatacctataacccctttttatttctctatgctctgatttttatggaaatttacataaatagcaatactaatatcatcccttaaatacattgttaacttcgtgaaacaatgactactaaaacattttactgcaggtggcattgtgttaaacgtatccattcctcgcatacacacacaaagtataaaactcaattttccttaagatggcagtgtctcctgttttttaaaaatgtatttagctggaaataaacaaaatgaaataaataaaaatcaatactgcattagctctgggaagatagaatttctttgaaatattgaatctggaatcatttttctaccaataatgcataggaaaaatatgcatagaaacacaccataaagtatattttccctcaccccccacacacccctacaacacaaaattcttgcagtcaaaagggcagatgcttttacttaggaaaaaaaaaaatagaagggaaaatctgtttaaaaaatgaatttacagcctcagcaactaaatgttttctaaatgtacgcacacctctcctaaagaaaataaggaattttattatttggaattggaattgttatcaaggttccagaatatttatttcgattgtagcattttagatgctttatacatatttttatcttttgtgtttttcttgcttatagatagattcttattttggttgtacacacacatacacatagacacacacacacatatatatgacataaatatatgtatcagtcagtggtgcctattgggcttagggcataatgcacaaataacgcacttgtggtggtggtattgttttaaccaattccattacaattgaaattaatctggagtctacctttcagatttcttagcaacaaaagccaaatcttgtccatgttttatttacctgtaaggtagtaaaataaatgtaaataaagcttttgctctatacattcaggcacagttttttattgaaccatccctaaaggtaaataatgagaataaaggaagggattgaggtggtacaatatgtcatgctctctcaaactgttgtctgcctttaccctcgcaatattcctgtgttctattaataagtatagtaatcccatttgacagatgtgttgagaaaaatgaggtgttctgccaaaaatcatactcaagtcgagagtccactacgtatcgcagagcctaacatacttacattccatcatgctgtttctgcagagccaaatatttatatctattgttcagattcccaggcttcatgacagacaagggttttttttaaaaaaaggtgaaaacacataccaaagaaaagaaaaccaggagcaacttgtaagagtataaactctttatgtaaattctaccagttatattttctaacttgtaattaacgatttgcaagtcttcattcattcctttattcaatacataaagcatatttagtgagacctttctttgttcaaggaactttcaggagtagagaggagtaatctaaagatgtgtgaggcaagaagatttgcctttaagaaattgtaatttatctggcttttgttgatgatttgactgcctttagtagaaagagatgctgggatttttattaaaccaaccaactgaaaatcttaacaaaatataggcacatctgagaaggtggtggagaaatacagatttgttcatttcttatgtgagaatatggataatttgcttttgagggtgttggtatcaaacactgagaacaggagcacaggatcaagtaattagtttttctattaatgggaatgaatattgtcttcacattcatctttttgtccctattggatggcaaaattatgtttaaggaggaagtgacctattcactgtattgtttttgagcagatgtgagacactttaaagatgtaacgaggatacagttgagaattctaggtattacacaaatacttttaccttttgagagaattaatcttctatcttcattttgattccttaccagcatgagctagtctcacttgtatatagaggattgtaaaccttcttgccatattattgacacatgacagtaagttttcagtgagaaatgagttttatcttcagtttgacttatatcattgtatttatcataaactttggctataaattatcttagagaaaaattcgtataggtttcttttctaccatgacgacatacaagaccctatcttttggacaaacgatgtcatctgccctagacagtttttattcactcttaatattcagaatatatgatttttataaaatattattttaaaacgtgtaagaaaatagttattttaaataacagaaatataaaagttccaaataagtggttataacgaaatttgaattaaagagtaaactaaattacatttcattataattcttttcaggtaacagaaagaaagcaacagttggagaaatgcttgaaattgtcccgtaagatgcgaaaggaaatgaatgtcttgacagaatggctggcagctacagatatggaattgacaaagagatcagcagttgaaggaatgcctagtaatttggattctgaagttgcctggggaaaggtaaaacctatatcactgaaggttattttgaacatacgtgaaaacacataatatgattttgtaaggaagtattaacatgtagcaataatagcattataaatattaatattgtttcatattccctttcttaaaaattaatctgtgcttttcaggaccatgataaaaccaatggtaagctttagcaggagtctctccaaaagcttccttagagttcagtaaattatgaataagaccttaagaaatacataggtcattagtctgaaaattggtccagagatgagatcctataatgtactggcttgcctaagaccatactgcccagatgaatcccacagccatgaagagggcaaggacacagagattgaagacagttgggctggacaggacttgcaagattagcatattgccaaagtcgcatttcagaaagaatctcaaggtgtctatgcaggggctatcatttccatcaccaaatgacacagcgactcctgtaatcattagccgttaaattcttgccctttctctgatggccaatcatttcatgctgcttagaacttagtcaagagactcatagcttagtatttttttttttactgtttattcattaccagattacctgaaagtgtgttgatataaagaaaatagctgatattgataacatgttttacctcaaaatttgccactgtgttaggccatttacacccacttaatgttttaaagttaccaaattaactagatgtataagacgtttatactttatttttaattcaatgtggctatccagattattcaaagttgggaaattttcaataccttatgtaaaaacttacaatcgtataaatgagacccaaactgaaaactgtctttatgtagattcagagaacaagtagtaatatattttgttacataaaatatttccaaataaatagtagggaattaaattgtttttcttctctttcagaataaatgtaatgttagataagatattgaattatagttattcaggatcatacatgagattactatagcaaggaagatacagtatatacaggttaaaactcacattagccttattttttcttatcattcaaacatattacttgaggtatttttgcattagcctcaccatgaaatcattcaaatgttataaggtaatgacctttgcagaggtttctaggttatccttctcatatagaaggcttgaatagtctggagaattgtctgcttgttgaatctgcctggaaagtatttttcataacgtcaaggagcaaagctactgtgagatctagtaggaaaaaaaaaaagcttagaaaactggcatttattttctttctttatagaataaagataatttatcactctatctagatcttttcaaacactaagctgttaatgacatactctaaaatctcttagttgtcaaataaagtatattcatttgcatctgaattacagaacttttttttttttttaccaatttatttggaaggttctcattatttctttaaaaataacaatcataaaagaatatatgccctgcagatctaagccagtcacatttatgataatcattctaatattttaacataaaattcaaactctcatatatgaaaccccgtgactattgagtacattctcatttctcatggtttcttggtaggtggagagcttaattcaagctataagtttcatctgctgtttcaaaagataaatgtcacatttttaaaaactaaattaaattcatttaaatgcaatacattaaatgtagttgccgatcattccaagtatttggaatgtgactgcagcaaatttgaatatctagagtcaatttcttttttattattttaaaaaatttttagacaatttaatttatatctgctgaatttctcccagttctgttgacccaagaacattatatttattttcgtatgaaagtatttgaacatctagtttcaaatattcaaatacataaaaatgtcaattactcatgaagtgattttttgacctttagtttatccaaacaaagcataatttcaagtacattgactatagttaaatagtatcagttttatcttaaagtatcttaattatatttaatatatattaaattccagaaaaattatttagtgtggcttgaagagatacatatggcacaacttgagaagcctaaataaattggaaaactaggaaaaggaaaattatagtagataaataataaaaaattcttgcatagaaatatatccacaatgtatcatgggtggtggaatggacagggaacattttaaagccacaaattggcgccaagcttcctaaaagacaaaaccaagaagtaaacatatttttgagacccaaagtttccaaattattaaaataataattaaaataattttaactttactagtagtatgttagctttttgctagaacttagtgccagaagaaaataaatgggagggtcataaaggtgataacacgctgattcatattcttataataaacaataagaatgtttatttttttctaccaacatggctccatgaaaaagaaaaatttagtgctaaagggccattcaggaaaagcaattctatgagaggaaaaaatattggagcagaagtctaaagtagtctagcaattgttttcagattttcagattctctattttattaatttttaattttgtatggatacatactgggtgtatatatttatgaattataggagacatttttatacaggcatgcaatacgtaattgtcacatcatgtaaccttctgtgaatatgctttcctgcaactgagcttttaagtagaattagacatcagagatttgaaggttatttattttctctgaatacagaaaaaaattttctgtatctttttcctggaaagaagccagattgtttctaactgagaacacatttctatacttggccctatatctaattggaaagcagggcttcatattcatgtgtatgtcatagtactagaaggcttcaatagctaaaaatttttgctaacatagagttttgggtttgaaccagtcacagagaaattggctattgagccttttcgtgccaagcataattgaagaaagaaaactcaccatcgacaactcaaaatatgttgacttctctaggaacctgtatcaatctctcagtgaatgtatttatttgaaaacacagttgggctattactttagctgtaaaagctattgaaaataaagctcagtagtactctcttacttgatgatggcatttaaaaggtgaagtgagaatgttttatagggggcatgaagtatcaagtactgagtgtgatgaaaattaatatactggttaatgataatactgagtctaaatgtactagtttttcctgtgatatgagaaaactagaattcacttttcaagatcaaaattagcaaagaatttggaagtattgctccaattggagaatcagaagtcaccttaaaaacaatacagattttactaatctatagtaatatatatttcataaagtcttcatgtgacacaaaagttttagggttttggtttttaactagccgtgttatataatcgaggaaatttcctatcctaaattagaaaagtataagcatatttaaagttcaattcagtttttcttacattacgaagctgagaaaaatgaatctaacattaaaatcaaaagcaatctggtctggcttactgtattcatgtcaccaatgcggtttatcaaaaatccctgtcatatcaaatcaagcccttccacaatgatctaacacttaagtttttatgagaaaaaaaaaaaattggattctctatactcatttcacctccttaccgtggctgtgggcaggccccagatgatgcattgtctataatataaactatgttggtgaccaccaaagcagccaggcattcttgctgttccttcatttcttactagattatgttatttaattaatttaatagtatttcatcgcctatttatagggccatagtccatgtgcaagcagttttccagtaccaccaaaattctcaataaggtcccatcacaactatcatttaggcctaccataaaatacacagaattaataaaatgagacaaccatcattgtgtgagcaatacttaagtcagccccatgcaccttcagagaggtactactagcattgagatgaattattccaacttgtagggaaaccaaatagataccgaaagaaagagtttattcttatttatttattttgagatggagtcttgctcttgtcaccgatcctggagtgcaatggcccgatctcggctcactgcaacctcctgggttcaagcagttctcctgccccagcctcccgggtagctgggattacagacacctgccaccataccctgctaattttttgtgttttcggtagagttggagtttcaccatgatggtcaggctggtctcgaactcctgacctcaggtcatccacctgcctcggcctcccaaagtgctgggattacaggtgtgagtcaccacacccggccagaagagtttcttacactggccaaaagatcagttatgttctttataaacttggcataggcttagggggcaattcaccatttgttttctaatgctgtgccctttaaaaaggaaggggaaggttgcctaaaacgatgaaagagatgttataaaaatcaagcttcttgagaaatatagtaaaattggaaacaccttaaatgttgcagtgtgttaccatttacacaaaggataaaatatgtagaaatatacattatttagttatatataatatatagtaaaagcagaaagatgtttgggaattaatataaactgaatacagaacaagagctatctctgtgaggaaagacaaaagaattgggtgggatatgaacaggacacttaaatgatacttgtaatatttcattccttaagatgagttatgcatacagaagtaatgattacatttggtatactttctgtgtgtctaaaatcacatataagaacataagaaaacatacaaaagcaaatgcttgggatttttccttttggaaactccactagccaggttctgtaagataacgcttagtaattaaggaacacccacttcgtgagtattattggtttcaaaagagcatggccactgttcattcggtttgcctaagcattggccaaagattctcctgctgattgagcaacaggacaggaacctagcagattaattccagcgagatgaataaggaacattgtctttccagtttttaaagaggatgtttctgtggctttttttttctttattatctacattgaagcatgatcgacagattcttatcaatgatttccttgtgaaagcagagtcaagggaatgaatagcgcaaaccgagaactgagaattttcatcaaagtggaaccaaaagttagcctgtgtatggtcagtttgtgtggcagcagtgctgttctatccttaagaacacttctattcagagagaatcgttattagagaggacagatctgtaagtcactgggtgaggtaacatcagaactgaaggtcctctgaaaatgatcttatttccctttttgtaaacaagaaaactgtgcaaaaagctccatatccctttctctgtttctcgattactttctttttaaaattactttagattcaggggttacatgtgcaagtttgttacatgggtgtattgtgtaacaattctaaaattcatatggaaccaagaaagggcctgaacagctaaagcaatcctaagccaaaagaacaaagttgagggcattacattgccccacttaaaatatactacaaagctgtagtaacgcaaacagcataatactattacagatatagacacctagatcaatggaacagaatagagaactcagaaataaagctgcacacctacaaccaactgatttttgacaaagttggcaaaaataagcaacagagaagggacaccttattcattaaatattgctaggatagctggctagccatatatagaggaatgaacctggacccctacctttcaccatatacaaaaattaactcaagatggattaaagtcttaaatgtaagccctgaaactactaaaaatcctagaataaaacctaggaaaagttcttctggacactggcttaggcaaagaatttatgaccaagacctcaatgacaaatgcaacaaaaacaaaaattgacaaatgagagttaattaaattaaagcttctgtacagaaaaagaaacaatcaacacagtaaacagataacctcctgaatgggagaaaatatttgcaaactttgcatctgacaaaagaataatatccagaatctataaggaacttaaacttgtcaacaagaaattaaaaaaaaacagattaaaaacaggacaaagaacgtgaatagacactcctcgaaagaagacatacaagcggccaatgagcatattaaaaaatcttcaatatcactaatcatcagagagatgccaattaaaccctaaataagataccatctcacaccagtctgaatggcttttgttaaaaagtcagaaaataacggatgttgattgctttcatagggtgaccatgattacatttgtaatagtcattcactcctaaggatttcaaagtcatgtgggtccaggatcctcaatatgaggattaatgttaccatgggaaccatgaaaagagctgacctaataggggccatatcaattctagccaacttcttgagcttcctaatagagaagaatgcctaagagactctctcaccaagaggaaggcaaattaactagtcagataaatgagagcagagatgggcaaactataattggtaggcctaatccattcagccaccttcttttgtacagcccatgggctgaaaattgtttttatgtaaatggttggaaaaaatcaaaagaagaactagatacttcaggacacataaaaattattaaaaatgcatatgtcagtgtctgtacataagactattgaagtgtatcaatttatatttgtttattttttctggctgcttttgtgctaaaacagcagagttgagtaattgtgacagagactgcatggctcacaaagcctagaacaactactatgtggccattcacagaacatattcaaactcctgaactagaggaaagctaatatagaagcagcaccctgtttgaccatagaattttgccatgtcttcttcttgaatgagtatcagaggtttgacatttctgggatccttttgataggccagtggcgttgtagaattggtctttcctaaatagaatgattcatctaagttttcttcctgctcagaattaaatagtaacatattccaaaccatagatactagaatgcatagcccttccaaaagatactgggtggtgcgtgacacaatttaagatgtttaaagataccatctacttgaagagaattacgaactcaagaatgtcttaggtattctaattcttaatgatcccacagagaaagaatgggagaacttccagaagtagtgaggatgtggtcaggggtgattaactgaagggacagctgcaggtaagaaaactgtcctgtgtccccttaccctgtgaccatgtttccaaattatagttacagaaaaaaagaatatattttaaaagtattccaaattgtttaaaaggtaaagaaaaatttttaaattaaaatgacaggaggaaagccatttgagaatattaacaaatgagataaaagattgatgatgaaaattgacaatttaaattattaatgctaattgcaacttcctacagcgacatagccctttcactgtatttttaaattcacccttcaatcagagtagtattaaagagggtaaaattaatgttaagtttttaaaaatatggatcaatcctagctagctgcatggtccagacaacagcaatgccacgaggcagccatcacagtgatatttatcaccccataaatgttcagatacttttccttttctgttaatggaattttctaggctgaggtgacaaacactgatagctgtagaatagagatgatggaaggaaatggcaaggcaatctacaggagattactagcacctgaagagtttgaatactggaactgcacaagttccttgagctttcatgataacccctactctcttggactgttatgtaggcaatagtaattcattcagcaaaaggacagggaaaatgtgtattttggtctctgatatttcccatgtacataagatattgcctgacacataggacatactcatgaaatatctgtttaaacgtaacttgcaaattaagagttgcaaattataatgacaaagcagttcttgagagaagagaaaaatgctgatttacatttaaaattgtacaagttttataacaaacataaataatcacctgatcaaatgttcccgttttatagatgaacaaatacaagtcctggtacatagcaaaactgtaatactatgcctgatttcaacagttttttccactataccaaattatcataagaagtcttattttctagtaattttaaagtaatctaagcttaaaataacaaaaagctacttattcacaataagcatgaaacaaaccatggctaaatttcaagtgcagaaaatataagtcctcattaaaataataaaatgaaaacccgtgtgtatctatcacctactacagtctgtagtctgtccccactgttgtgattttagatttcaaatattgtttgttagtatcttaatatcactctgattagttgagtgtaagtaaatcaatctgaacatcccattactggccaatattgtttagcatatgaattgatcacgaaaacataaccataggaaagtaaatatgtatgtgattaattagaggtttacttccctgaagatcattatgtttgggaaatacaagctttgacaaagtctaatctatatgattttctgatttaatcactaacattttatttctaattttgttttaagcatcaaagattccaactcagttaaataatttagttccattaaacccctaaatatccatggtgtcatctgaaagttcaaatggtagaataagattttctggaaaaaaaaaatttggtcctatagtatgttcatcctaccgcctgttttattaacagtagtcttagtatgccaagagttgcctgagaggaacacacacaaacacacacgcacacaaatggtattaataaatttaactgaaggtgttaaatgcagaataatctatgtctaaatagccacttgtttaacaaattaccgtgtttttcacgtttattttggaaacaaagttttataatatttaacctcaggaagaacaaacattggttgctcaattatcctttggctttcagttcactcttagaatttaatgactatcactcaataaaaactcagaatgcatctttctgtttgcctgtggttttcaacattggttgcacatcaaaatcacccgagaaacttgaaaagtatcccaatgtttggggcccacttccagagattctgatttaattggtctaactctaactagctctcttattcagcaaagttgagaatcactagataatgtgatacaagatccgcgaatttcaagctgtctgacgagagcctaaattcagctcagtcaaccatgtcttgtatatatattttttataacagtaagatttcacagtttaaagagatctggtttctggtcctagattatctggataactgcctcaactcatcattcctcttagctataaaaatataagaactattacttactctaaagtctgttatactctcattcccctgaaaaattacgtatcttttttttttaaagtgagcagagtaatttatctgtgaagtgaaataacactagcagatcattaacttggtgcaatgaatgcatcaagcagctgttacttagaaaatagaacatctgttacatgccattggagtcactattcactgtcattatagttagagctgttatttctgttcagttcattctgctttcatgaaattcttctttaataaacaatacagtgttattaaaaagtcaatacacattgctatagaatccactatttaatgctttatgttctttttgaatgtatcattatattattctgtcacattagcctaatagtaaaatatgtcctaaacctctagccatgatagagtaattttgggggctgtaaaagcaattagcatctcatttcctcatgtttaagacatgttagattgtgtgatgcaccattgatatgattacagctgctgagaatttaaaaaaaaaaaaaaaaacactaccactttcaaggtaaaccttaattgtatgttacatctcaatttccgaatccttaaaatgtgacaaatgcacatcttagaattgcagtaatatggcaatgtattccttttctttccacgaatatgttacgtagctaaaaggtgaaagaaccctctcctgttctctgtgatcagaaatggtataatatttgcaaatactaagtgcagaattcacctgggtagggggacttctcaagatgccttttatggatgctttagttagccttttattcatattacagggaacatgagtaagagaaaggaatagctaaaataagtctgaatttaattgagtcctagtaaagggaggaatctataaggaaatgatgttaaggtacgtaggtaaataaatgtggtgctgattgaagataagctctagagaacaggagactcttaagataataaaatttgtttaaaaagagggggtggaaaaaagagatcagacagagaagttatcttaagaatataagtccctgagaaattccaagaaaatctgtggaaggtactggaaaacttgtgaaaatacgaaatgggtggaggagagaatagaggttaagtgagctacatttctttacccctgaagggaaatgtttgtaaaggtgttcctataggaccagatgatttttccaataatttttaccgttctaccattaaataaaaataatgaaaaatgctgatggtataatcagcagagaccaatggagaaggtttttccatcttgctactgtatcagtgaagtgagccgatagctgaaccctgaaccgaacatgcctttttaaatttctacaagcaattatacttgtagatatggggaatgaatcagaatgtattcttcatccttcccatcaacatggggcatgacttcactggaagaaattaactcattatactcattcttttataataaggaaattagagtagcatttacaaattatggctaagaagtagacagcaaatttgtttgaaatcatggaagttagtgcttagtatttggactatttatactggagctatcaaatgttacaaagtaacatatggaaaataatatgttagacattgtgagaatttatagtttaattggattttacttatgtcagatattttcccctctatcataaaaacccttagtgccaagtatatagtttgcgttcaccttctcttgaatctcctgaaggtggacttacaatcatgtcataggtcaagttaaaactgagtgtacacaatcttgctttttcttcagccctaaaatcgatcctagcagcaatcacattactacatgactgaaaaacctaaagtgtctgagttataatttagtgaatttagtcattgaatttgaacttgctccttcagaagagtagatcttctagaaccctctccacttctcacctcacaaggcagaagaaggcatgtatgctgagaatcggatgcttttgaaaaggaggaaatgccatatcttttcagctgtttctttccatctcgccaaccctataaataaggagctccctttgagaggaatgagtacaggtataaagacaatggccaaggcaatagctctaggttggttctccatacatctgaagatgcagacattcttgtgttgtgggaaactattagagccagagaaaatggttcgtcaacaacctcatcaaatgtattcttttagtttacagtaagaattccctgttcctctatggcagccttgtattctaactttcataccttctcgttgcttcgtactttgtctttagtcaatccaaaccatcccatgcacactccgccttcaagtgtcacctttcccttgtagtcattcatgcttattccagccatggctcatctgtttccaaaaaaaaatgtgatttttttctagtatgatatcaaattgttttattgcatttaagctttcctctgcagctacactgtaggcatgattagagtgaggtttgcaaagattacctcattcctcatctctggcagtgaatagcacagtacagactggatattaggcacctgatatacattggtcaattagtatttcagatctccagaaagcaagctcagcatagtatttaaaggctaagtcttatttaagtcttatttcttaagtcatatctttgattaaaaacacatttgagggaaaaatttaaggcctactaaattaacacaatattttttcctaacccaaaacagcatgtatacaaatgattgaatactggttccttattgttgaatagcatacataaaagtttaactctaggtctctttttttacagagtgtaaattgtcctgtgaatcacttttgaccattagcagttataaaccaccatcatatcactgcttttttcaaatacaagttgataatggtgataaattgaacatcttttagttttaatttataattttgtggaacttaagaaggcactagaaattagtccacatttcctattttgttcccatcaactgaacatcactggacattgtttaaattagctggaggaatttggccagatgttgacacataatggtttctgtgacccaggaactacctgcaacattatcccctaagttcaaaacttttgtgatctcttctgagttttggaaaattccattgcctttaattgcattgcttgtcatgtaagaaacaaaatctatgtacacaataactttttacattgatgctaaaatatagtgtcatctttatgaagacttattaagagataattagtaatccaaatataaattaagcttcaactttgtgaagggttacctttgtgaataaatcaactacagcgagatgccagtagactggaatatagaaagtagataattctcatttgcgtatatgtccatctctttgacaaactcatacttggatataagtttttgaaggatggggacttctctaccgttttatcccacagagcctagtaacaatggctaacatctatggttgtagaggttgtatactacaaaaggttgaagtcaaagtattaaaaggaataaaatctagtctatgtctactctgaagttaagctctaaagggtctgtatctacccaaatgagagacttctaataatctcccagaatatattgaggagaattacatatgattctgctacagtagtaactggcatataataggagctcaggcaacacttacgattgataaatgaagaaattgcttttatgaattgctaagctcacctgtgtgcaacaaatagcacctacatatgaagaaccccatgcatgatagctgtcgagttcatctggcattaagtaccttaatttcaggcatgtttttattgaaaaaatgtgacataaaaccatatcttagaattgaagaaacagtgtttttgtcttgcataaaaatttttatacattgtttcctcatttatttctcctgtttatccgatgccaaaggcaaaaccaaaacagaaagtatgagaagtgatttcgagtggaccaggaccttatggcgtggcagaaagacagccacaggactacttaggtatattataaagatagaaaagacatgttgagagtgactctatgaggccagcctatacctaatttcttactcttgtactgtaatttttttcttaagaaattagatgtaggctggcattacagagctgctccttgtgtgtttattaattgattatttgtatctggactttctccactttcctgttattgctgtttctcaatgattttgttttgctttggctttctgtgattaagacatcagctccactcgcaaatagcttttcaactcgagtgccaatcacagtctctgtatctgttaaccttattgagaaaggagaaaaagggtctgttgggctctggctcagctctctgtgaatgtcccacagctggctaactagacaggcagggaaagaaccaggcacagactcagtggaatgccgagtggccacattgtctgtcagccgtgccatgtaccaggaaaggggctttatgcagggcaggtagtaaacctttgtactaagatcactttttccatcactactctctatcttttttcatgttaaatgtgattgttttcatgttttataaatcacctcttaggaaatagtggtattctcttaggagattttagtctagggtatgtggatagaaataaggtctgtgaacttggattgggggaaaactttatctttatttgtattcaattaaaaccaaaagtaagcagttttttcagttaaaatgtgagcaacaaactccagcaatagagatacccatgactttgtcactaatagaaatgacagatacttttataacgtgttccagacattgtacatacttaaaaataccagttatgctcgtcatcactacattgaaattatcctaaagacctgatgctagatcttgttaattaacatattaggaaataaaacatgtattactacatcacaaatatttaaaaaatgtgttgcacattgtatttcagtataattgttttcatttaaaatcctatgtattttgttttatgcatttaaaagcattattatgagaatgggtttttaagcttcaacagatgccaaaaagatccatggcactaaaaggctaaaaaaatccctgctgcagaaatacagtagcaccatactgtagaattttctaagggcagtttcttatttgtggatggattttcaaatatctgcctttagccactacatgtataaattaaataaatataaatatatttagttgaacaatatgtatgtttattaaatatttataatgaaaaataagacatgaattatgcttatgtacatatatatgttcatagttacccaacaatgaagcttcagtatatatggtatggttttcatgattcattaatacatagttataggtttaaaaccttgcagaatcatagtaaccatacagaaagccgtttcataagcattaaatcttaagactacaagacattacttgaaggtcaatgctctccttttcacaggctactcaaaaagagattgagaaacagaaggtgcacctgaagagtatcacagaggtaggagaggccttgaaaacagttttgggcaagaaggagacgttggtggaagataaactcagtcttctgaatagtaactggatagctgtcacctcccgagcagaagagtggttaaatcttttgttggtaagagaaaaggctagaagcttttacacccttctctgtcacgagaaaaagatacataagtgaccagtaacaattctgtgtttgaaaatttctcaattctacgtatatgctggctcttaattcaatatctataacaatattttaatatatttttctttatatttacgcaatattctatatgaaaataccacttaaaactaatctcaatgaaactttattgttgtcttttaaacattttagaacataggaaaaattctttaagaatattgtctaaccaataatgccatggtatgtctctgtacaattaaggaataccagaaacacatggaaacttttgaccagaatgtggaccacatcacaaagtggatcattcaggctgacacacttttggatgaatcagagaaaaagaaaccccagcaaaaagaagacgtgcttaaggtagcaaataaaatatgaaaagtaatgtccaaattgtacaccagttacttcaatcatctttgtcctaaaagatactaaggacgtcttaataagagtaaaacaatcctttcttccttcctttatctttccctttttccttccttccccctttgaatggaaatgaatgattttgaagagttctgtaatctgactttctgttcaaatccatcactcagttaattatacccaatgtaaactccgttcagaaagatattccaagatttattttgaaatcatattgcaaatttctgcctttgtcaatggtggtactacattcttgtgtctaacacaaagaacaatctgacactatcattcatttagcccatctgaatgaacacctgaaatccagtcagctgatttttttgcctatgccatatccaaatcttggtaattagtcttaatgttgggcttatgtaaagctgaggttttcatttttaactacatgtaaactaggctttgggttctttcttttagtctcaaaactgactgttaggatgccctgtcttctttttcaaggggaacttaatcttttctttaaaaaatgattccgataaaagggtatgagaggtgtaatacgcaaatataccttatagacactacattgtttctatttgatgatgtctcttttcccaattaaataggtagagttgaattttaacagctctcttttcaataaacattttttattttgttttgctgcaatgtttgataaatttattgattagttgtttactatttaaagaaaactcaaaaattatgtttctttctatgcaatttatttttatgcctctgatattttccacagattacgatatacctttaatgaaaaactataaattcattccaggctatccccaaaacacatttatgccattgtctgaagcttattttgatgtggatctgtattgtgctcttcattatcccttgatgtatagtcagagatgtcatcttatggtgaatttccttcaaggctttttgaataatagggtctgagttatttaacttcaacctctgtgacccggcaggtcaggaagaacattcctcagtacctctgtatgtgacagaaaattcgtatgtgttagaaaatcactttttttcttatgacactcaatgtaataaagaggaacttgaaagtgctaggaaggaatagaaaagtgttcttcagctacctgacctcctgagcacatacttagttcattccacaactattaaattcagtaacgatataataaaataagactaaatagaatatattatgatagttgcaacaacatagttgggaaaacatccctgtccttcctcggactaaataaacattttaaatagacatgcatcaaacttaaggacggtgatctatttttctgaaatcacacgcattttcattttagtcctgttttatggaagttgtggttttatctccctttgtattttctgcatgtgcttgctctcattttcttactttctctctctctctttctcactcttctcgctcacttgctcactcgctctgtttggctctctttttctatcttgaccttcattaattactaacttcaagtcctatctcttgctcatggaatatagcgtttaaaggcagaactgaatgacatacgcccaaaggtggactctacacgtgaccaagcagcaaacttgatggcaaaccgcggtgaccactgcaggaaattagtagagccccaaatctcagagctcaaccatcgatttgcagccatttcacacagaattaagactggaaaggtaggaagatctactccaaggtggaaacttgtgctaaatggtctcttgcgaaggttgcgcagtactctgaaaggggcaagtagaccccacagcaaggttttcaaaaggaaaatgaatgccaaaatgtatttaaggaaattttaccactgattataatgggagataaacgccactcctccccgtctctgtctctctctgtctctctctgtctctttttctctctcatcttttgctgccatagatattctaggactgcattctatgctgcagtttacatacgtactttcaggggtcacctacagaaaaaaataacaaatagcatgctgaaggccaaaaaaataaataaaaccaaaagcacacaagtcatccatcaacataaagcactaccgataaattttgccaaaagcagtactgatacaatattgcttgtatgtaatgtggatcaaatatccaaaatgaggtcttgtacatcttctgcacggtctagggtgtttttttacctctttactggttgtgcaagtgtgtttgtttaacttgcttttgctagttgtagacactgtgacaaaattcattaggctataatgaaatgatcacgccatgaaaacaaatcattgcaaagcttacatatcctaatttttgtaattttatatgcctatttatattactgtttaagaagaaccagggaatatggaacttttgcgtgatagactttatatttgtgtatgatttgatgaagagaaagtcttatttaataagtagtttgcaaaaatgtataaatatagtgttatagaatttcagctctttgggaagatttgaaatgcaagtaattacctagaaatttatatactgtagtttgataaatttcaatatatatgatatgctttcaaacataaaaatgtatataaaatcaatatatgtatttaggtatatagataattgttagaaataatctgaaatgaaaaaaacattggagtatttatgagaaaatatgatgcagtatgtcaggtaagtattgattcctggaaaaatagaacattttcaaaaaatattttgatagatataagcaaccagtaatagcatggtttcacaattgctgcactttctaaggcattacagtgtctcatcatgttatataatagtacatatttaaagtagttttcaaaataagtgaaatgtgacatgataaattctaaatagtttagcttgtatgcatgagacacagttacccttcaaaattcaccttcccaaattaaaaagttgttagtttaccttaattcattgcaagttatttttaatagttaactacttagttctcttgtactctctctctccatacatagagaccttatatagttgacttttaaaaggctatattctctacatatggagagagacagcatgagagaacttagtagttaactgtcacaaatatatatatttgagtcagtcattattacctgcaaaaaaatgtgacaggctcttaaaattgattaaagttttgaaagaatgtattgttacttacaaagacaattgtttttacttctaaagatatcaatggcttatgtaataacaagacaatgaatggagatttatttcaatccttaaaaaatgctactacttcattactaagatatagacacacacacatgcacattttaataaatcactaagctatagaatatttaagagaaaataaggtattatctttggataaattgtgttacaagattgtggttcacagatattaaaaaatgggtagaatttgctctccaccacagatgtgacagacccagccaatacaagtttgtgaccaagacaagtttgtgagttttcatttcacattctgcatgaatttgtaagtatacttctggaaatcatgcataaagtgatccactctatgaacttcttttattttccctagaaacataaggcataagaaatttccagtgaatattcatttattattattattattattattattattttgtgtgtgtgtgtgtggtggagactctctctgttgcccaggctggagtgctgtggcataacctcagctcactgcaacctctgcctcctggaatcaagtgattctcctgcctcagcctcccaagtagctgggattacgggcgggcgccgtgacacctggctaatttttgtattttggcagagacggggtttcaccacgttggccaggctggtctggaactcctgacctcaagtgatcctcctgcctgggcctctcaaagtgctgggattacaagcgtgaaccactgtgcctggccccagattttcaattatatgttaattaacaaaataatcacatgtttgcttttcaaagtatttgtttttctctaaattagtaaaggcaactgagtgtaacaatgaccccattttagggctctgaagagataattatgctctattatcacgatgaaatgaaaaacacagaaataaagcatatctgacactttgcttatatattcattgcatcagctaatgggattgagcttccattgtgttagagattgtggtgagaagatacaagggtataaagatccttgcttaagaaatacatgttttcaaacagaaatgaatacttagtataatcataaaatatgtttaacactaattcatcttcatggggatgttcaaataatggtgagatgatctcggcagagagaacaatagatttagaaggtaatctcaccagagaaaacagtggatttagaagattgagatttaggcctaactttttcagtagtagccagaatatgtgatttttctgcatatccatttcattgtttgtaagatgaggaagttaaaatagactaacaatttttaaaagaaaacctatcctgcccaaaatattattatttaaaataaagtattaaatttaaatatttaatattaaaatcatattatttaaaattaaattaataaattggaaaataatagagttactagatgggggaaatatctgccattttatctttctccttcctatgattgaattcaggaagtataaattatgctcatagaacatggtttgaaatttctaaattagattagttcataaatccctgctcgttctaaaatttggctattcagtaatcttttgttgattacaataagaaattgaaaacatttaatgtcttgtgtgtgtttgctctggagtagggaagtgctgaagtgctggaggttttagggggtagcctttgatctcaaaatcaggtttctttatagtaggggttatacaggataatattaggttagaatatggcttttctatggttgagtctatgtctaagtttcatggaagagtaacctggggaaaaaaaatactatggtgataaaaaaagtagatttggattgaacacgggtaggtcatagactctttgtaatcagtaatttcagtatagcctttagaacataactctaaagagcccttgaatagagaaataacttatgctgaaaattcactggtgtctagatttactatttggtgaagaatacaaagtggggtactcccatgtctcctgccaggactgttcatgacaagaaattccgaagcccagaaagcagtgagtaaagggatcctcagttcagattggctgaggacttgactgtccaagtgcagctctctgtaatgttaattttggcctcagcaaggagcagtatggtgagagcaaaaagtccttaacttcaagacacaagacctgctttgagcactagctgagcacattactacttagtgattttggatatgcctctttacctctcagagcctcatttctagctacaaaataagggagatgatgcctgttttattttaatctaaagattgtaatgaggatcaaattatgtaatatatgtaaaaacatgcatttaaaatgtattaatcagtgtatagatatgaaatggttaaaaataattaatatcaatgggtatttccatcgttacgtatattacacttgaatggccgaatctggggggttgagacaaaaactgatggaaaaaaatgaaagaattgctgattttctgtggtctctgctgtaatcgactggagtcagaaaatcgtgtctttgctattttcatgacaaagaccagccttaaagataatgaagtggatgaatttaagaactactaaggagttatgtttgtcccacatacgccccttaaaatacataaaaatgctgccttttcccattttattaaggttacctaagagtatccaatgactttgaaaaaagcgtgttttttcgtaatctatgtgaaatcaatgtgaggaaatggcagttttaatggagaggatcagaattgcaacagtcaatcagagataatattagaaccctgagtaaattgacagaatcaatgaggagagactccttgtctcaactgtctctgttttagggcatcggagtatagtggcatggctgagggcaagtggataccatcgggaaaataaggtgataggagacaaaagtataggaaggggcatgggaagacaaaaataaactgattatttattcatattaattatgacagttctacccctctccatccctctagaagccaagttggagaaggggagtcagcaatttgggagagatgctagttgaggtatatctaaaagcactaatgagtgaagacttgagaaaagggattaatcaggatgaattctcaccaaccatatattattttccgataacagtgtttggtagtgagggggatctattgctaggtaaaatacgatggattcaaggagcttactgtttgatgatagggcaagatgtgttcatggatactagattgagagtgagtgcatggtaagtgagtttagcagtcactccagcaacacagaggaggtaacaattcggcataaacatatgagaaagcttaggagcatacagtgtgttcaatgaagagtgagttcctttagttttcagagtagagggcatggaagataaaacttagttgtggatgataaggctgaagattatggctagacacagtgtgaagaggtcatggacagccagactaatcattcatgcttaattcagtatgcaatgaagagttcttgatgtgctctgtgtgtgtgtgtgtgtgtgtgtgtgtgtgtgtgtgtgtatctgtgtatgcactgttgagaaattagtccagtgatagttgtgaggagaattccactgaataatgacatgaagttcgggagctattgcagtagtctagatgagatacactgatgacctcaaaaaaagggatagctatgggagtggaaaggaaatttcagtctagatcagtaaatcttttgtatgcacttgggtgaattgttaaaaccagtgtgctgggccccacactcagagcttctgactcactaggtctggagtggagcacaagagtttgcatttctaacatttttctaggtcagattgatgctgaaggtctagggaccacgcttagagaactgctgctgcggagatatttagaggtagcctagagttaagtcattacatacaaggacccaagaagatgatgaattcaaaaatgactccaaatttaactctgattgactaggaaagtctgcatataaattccaataataggcctggtgcggtggctcacgcctgtaatcccaacactttgggaggccgctgcaggcagatcacctgacgtcaggagttgaagatcaacctggccaacatggcaaatccccttctctactaaaaatacaaaaattagctgggcatggtggtgggcgcctgtaatcccagctacttgggaggctgaggagggaaattgtttgaacccgggaggcggaggttgcagtgagccgagatcgcaccactgcaccccagcctgggcgacagagtgagattccatctcaaaaataaaaattaaaaaaaatttcaataataaaatatgcatcaagttatatttttattgttgtaatacttagctgcaaaataattttgactaaacaaactttaggtgtgtcatattaataaaggcaattattttactttttacaaaatattatgtaatttctacataaaatttgcttagattgtatttttctagagatttagatatacttcactgttctaaggagctgaaatgttaaattatttattctgaaattgatactaaccagaaaaaagtgaaattattttctctgactttgatcctttactaagacttatttgctataggatatatctggcatatgttctttaatttccatataggccttgaaaattgctgctaaaattcatgtagcagtttctatatatatgtattacaactgtaatatgagatttggacaatcgggcatcaaatacttaaatattcattgtttgattgctgcaataattgtaaattaccaagtttttttttttttttttttttttttttacttccattcagtgtcagaagatataaaagtaatcattctttggataagagactttcacaagtttataggaggctgtgagagagtcagtgaccttcccatgtaatgtagaatatataagaaaaagaaacacatgattgggcctaatctatcttaaaatatggttctatgtgtggaaaataattaagcagtgatttaattattttggctctcctaaacttcggtgggaaataaatgatgcattttataaatgtgatctagaaggtccaatgaagatgtattggattgaaaatttttaattaaagcttaattttctgtagtcagatttatcaatgcaaatacattgatattttgcagtctctttctgatcgtattataacttaacacctatgatggaaaataatattgtatcttaattggaacagtattcttgctatatatattctttaaattttaatttttttaatttttgtaggtacattgtaggtatatagatattcatttttagtaaaattttctataaaaacatgaaaactgagatgaagacttgtaaatattgcataatttgtagagcattaaatatgtaatatttacaactaatatcttcaggtaatagtaacagatcactagtcaaactgtataatatctgcaaattttattttactaaaatgaatcagaaaaatatgaacctaacaacataattcttatgttagcttattttttccacatgtgtaattggttatccctataacaaggttaagtccattgaaacttcgctaataaatccctttggtaaccatgtaaaatatttttaaagtagatgtgtaattgagtttggtgagcagtgtcatttgataaaactatctgggtcttgttagcataacatttgaaataattaaagctatttggtgaatcttgattgttctcctttgataaaggaaaattagtcccctgatcagtgtcagtagatgtaaagcaattttgctttggaccagagactttcagatatttataggaggttgtgagagtgtcagtgagttgaccaagttctcacagttagacagtgtggttagcaaatactagatctcagtccattgctttgtccacttcaatacactgactcagcatagtttactgcctctatttatgtcataaagtagtttttgttggtctactatgtgttagtataaacatacccaatttcacttcaaatacagtgatttcgttatactttttgtattaaaaatgacaagaacaaaaggtggtagggaggaagaaatggaagaaggaagggggaatggaagaaataaaactggaaaacaacctaagtaaatgaaaagaaagtttaaaatacaaaattgcttaaagtgttatgtttttacttttgtctgtctcccccatacattttagagttaaatgttttcctcttttaattcatttcctactccaaaaagtcatgtaatcatgaaatagggcaatattctaagttaaactttataaaaggtcgacagtaggaagcagattcttgacccacgaatatattttgcatccagttttaaaatgtgtaagcatgaaattaacctcatccatacaaaatcaattgaaatctactgggtaatatcctctaattagcctcacaaattagtcacattttcacatttttattatcaaagcattaaaggtaaaccagtactttatctattctcaaaagaatgcaaccaatgaaatgtcactatttggagtcaatttatttaatttaaaaataatatttcttacattttcttgtttgctctaataattttaaaataatagaataaataagtttataaaccatattttaaataatctttcttctagcatagatgtagtatctttccaatacacttatttgtttttgtaagttcttttcctctacagatagaatgatgtgaaataactcttcatatcatatcagtagtctgtcttttctgtactatagtgtgttacttgtccttgaaatttttcatcttggtttccatgaattctttatttttctatatcaatattgtaatgataaataaattttcaaagctgcagaatggaaaaaggagactgatggatttgaagcaattttaaaccaatctgtagcacttggattatttattttcaatttaggttttagtgtgatttgaatatagtggtaatttatcatgattattaagattccatagtccagattaacaaatgtttacttgctgtctgtgtaaacacagtcgttattatgctagtgtatctgtgcatgccaaagtaatatttaaccaaggaaagcttacattttaaaactaataaagtgtatctgagtaattttgaatgctttcaatttacaatgaatcagtttgtaattgatcttgcttttcttcagtctgttatcctttgttaacttgttataaaattcagctttaatgccaaaacttcaacaaagccttaaatttcattaatccttaaataatccaacaaagcacaattaatagttgttaagcaatttgaaacattaaaaaatcaaggaaaacaaagtgttgtctttctcggtttctctgtctcttctttatgtgtccatttatccatttattatacttccctgtcttctaatttatatgtattttgtatgactgcacagtcatgctaaagctcttaaaatgaaaaggtaagtaaaaaattaaaagtgtccaaaacctatgcttggtatacactttctcatgcaatattataacttttgtttgattattttctatataactaaaacctattttgtgtgcactgtctaacattgtgtgatttaattgtgattccagttcttttgtggtcatctatttcctttaaagtcaatagaagtaacttacccaataattaagatgatttatcagccattgctttcaactgttttagacaatttatcataattctgaattgaaaagcaggcatgatatactttgtgttttaaaatttggtgactcaagaatgagctgttaaattataaacgctttcttattacatgtttcctttataaagttgcataagaattccaagttacaaagacagggaagaccaaggaatgacatgtagaattttaattgggtgggaaagtgttttctgttttagaatgggcatagcctaatgctgaactagtgaactcttaagaaaagcaatgaatttttttcatctctttgtgtccaaagactattaatcatatggctgtcaaatggctggtgctatcttgccaataacatagctaaaacaattggtttgataaacttattttggttataaaattggtcactggttgattaaattaatatataggtagttctaaaactaccgattgatataataagcaccttttcctgtataaaataaaaggcagtgttttcactggaaaatagagtagtataagacatattgccaactttaaggatggaaaatttatttagagagacaagcatatatctttgaaagccaaataatattatattcctgtctataagaaagcagtgcaacacaagctgagatacacataaatgagaatagaaactcctgaaataacaggtcaatcccactcccgtaatttttcctataccccgaggactgcctgaaaatttcactcagaacacataatgcaagataataagaccgacgtaagaataatctaaattcaccacaagttataaacaaaacattactattttattcaaagtaattatgagatattagttctttacaatgttatgagtataatggttaatagagctctatactgcctaataaggtggtcatgaaccacatgtggccactgagctttagaaatttggctactccatgttaagatttataaataagtgtaaaatatgtgtgggttttgaagagaatataaaatgtaaaatattcatatttttgtattgattatgagtttatacaataatttggacatctcagtgaaatcagtaaaattaattttatctgttttttgttttttactatggcaactagaatatttaaaattacatatatggcatgtattatatttctattgagctgcactactataaaagttctacttgaatttagagacaagaacttactgtaaggttataaaattttaagaaaatgtctgtgtgaaaaggattttgttcctaaaatgtgactgaatacatcctcatctagtctctgcttataaacatttagcattacttgaaaatcagtgtttttaaaaaaattgcagtcctcatcagttgttcttatataaacctaaaatttaggctccaaataatttttgcccactgattttagttaatcactttgaaactacacaaaataaaactactcaaattcttaatcttcctaatttttttaaacaaaatgcacggtagtctttcattggaaaatttagaccctacacattgaactaaagaagtctaagtttccattatcttgcctgaataattagcacttcagtttttggtagtctctcccaaagctctttttacatcttcccccttttttgtgtttacctggtggtatcatgttgcttagcatttgggcagcagttaatatacatactcatataatgctaaccagtcaggtcttttgacatttctacatagaaattgtgttatttaaaattccatgtcactaaaaaagctccttgaaatgtctattttggccctcaatttttagtcttttgttcatttattttttcaggaaatatttacttatgaatatttactatgtaccagaaatgactgtaggttgaacatgagaaactcagctccataggatgtctagggaacacaccccactgactgtatctgtggtatgccttttctgtctccaaataattcctgattaaaaaaaaaaaactgcaccctgtaaactaaatgcaaggctgtgatatcactttttatattgccgcagataaattaatctgtagttttgttcttcaggattatgtaactctaccaaactggaatctaaaatcctccatgttcaccattacaatgttatgatttcatcaaatcccttggtaaaataaagactcattatatcaataagcatgtattttatcctttaaaaccatagatttcaaaggaggaagggcttgacctgagccaatggatgattaggattttgagaggatcaaaataagacccaagatttatagagcatgtatttatattggatggacacatagaagtttgagagaaaataatagtcaacatttattaagcttttattatataccagacaccattctaacatatttgatcttagtaatagccctgtgaggtagatattcatcttatctccatgttataaagaaactgaggttcaatgaggataaataacttgtctaagttccctcagctagtaaatggtagagcccagattcaatctatgcattttcatacagaagtttatgttcttcactagaagatgaaaagtattctaaggtcattgaaggaggcataacagaagatcaccaaatggcctgcaaaaaaaggtctatattaggaacacttacataaggctggcaagtctttggggcaagattaggagaagccttgactactgtgctggaggttggactttattctatttatactcaatagatgcaggaggttcttcagcaaataaatagcataatgaaagaaaggtttttgaaacatagtaagctgatcattgggcacaggctggaactggtttgactgaaaggagattttacatcttttcaaagcttattgccttagttttgtgtaaggaccaggaacgatggagtctctgggaatacaaagcaagtggatcatagcaagtcaattgacacttacttgatatttattagacattagagtgagatgttcaaaaatagcatgacttacgttttacgcctgaatgactgagagaaatggtcttccattaagagaactagggaagttagtattgtaagcagtttgcgggaaagataatgtgctccatactaggaatgtgaaacttcaggtgaaaattcagctggctattggagagtctagatgggaattcaaaagtcagataacagcttagggtgaagacttggaaggcataaaaaattgttaaattcgtagaaaattgtatcttaaattaatagaagttaaattcatggagagatgagctagagaagaagcagttggaataaaacaggtaaatctgactgtaaatagacctatgttcttctgacatccaagtacacaataaaagttattttcaacattatcattatgtattcacaaaatcacatagaacatagttgctttcattaaatattagcaaatgtgaacaaccatttaataacataaaatatcaccaaattgataattgtatagttatgattctaagggttgttaatctttttacttttaccgtcatctaaacagtgtatgattttattgtaccgtaattgctaataatacagacattgaaactttaagcatgtttgtaccactaccaatctatactggttcaaataacttatgatatttcaaatggcaaatgatcattaggatttaaaaactggtactgtaataggtcacttaaaattatctcataaatctttcaggggtgtgtagaagtacctagaagatatgtggttattcatgttgcatatgagaatcatgtcatcatgaatagaatttgattattcacttcttcaatagtgacagattattacctttagatatttagtttttcttctacacttatccgtattgttcaccagaagttgccatctaataaaaattcaacctcttcctgggaatgtgactggagaagggtaggtggggaccaaacttgatgaatgtaatcgtcttggcaaaagacacgggggtcattcctgaattggttttacaaaagtaaaatgttttagctctgaaagaaaatcagatttctgtatgtcatctatgggttttcaagagctatcccatataaaatatgttctagtgttttaatggaaagaaatacagcataaagattgagagagtatcaatgtattttattaacagaattttaatctaataactaaaccttgcccacttttttgaatatatatttgattttccatgtcttttcacttatcactccttttcaagggttttgtttagaaagtcaagagattttaaagttttcttagactggtcattatcagttcaaaagtaaagaaactgatgtttacaaggttgaaaagcatagattctttatgtgaaatatattaggttcattcgtttgaatttatttgcatcaccaaccaaactgttcctaaggcaagctaatggcattgtcttagaagagcatgcctgtcaattgtgctgtgctaaaaatgtcatttaaaacatctgagcagattgccatgtagtttttctaaggataagatgacaattctgcatttctacctgaggttactgttacttgataaatgaggcaatttctgatgagacatatttacccaaatgtatttatatcagaatatttaaaataaggtcaaatttgactttagaatattaaaaattagcccattcaaatgtatctgtaaattgactgttgttgatatcaccaaatgatgaattgtactatcttgcatgtatgttcagctctggtgatgtgaaatgtttctccttatttgcatcctcaggtacttttccagttgtatttcaaaacccttcataaaacataatatggaaacataatgcatgtgattagtttagcaacaggaggttgaataaatgtatttcttttggtttatgtttctaataaaaagtaattttgatttaaagtagcactatctttttttttaggcctccattcctttgaaggaattggagcagtttaactcagatatacaaaaattgcttgaaccactggaggctgaaattcagcagggggtgaatctgaaagaggaagacttcaataaagatatggtaaattggttgtgataaaagtgtgaatgaactaggagtggaaataaatatttggaaagaacttagataagtctccaactgaattttcagagcacatattacacattttatgattctaatgaattttataaatgcagaatattcttggccttttattacaaatgctgaattactatggtatggtaatataggagcacttacggtttctaataaatagcccagcaattttcttttgacctgacctacttttgaacttatcaagggcaaaatgtaattggaaaaaagagtcgaatcataaaataaactaaaaatttaataaaatactcaactatcatagatgactgacattttgtatcagcaatgtttttggtagtataacatttatttcaatgaagagagaataatgcataatatgaacattatttattacaatttcccacaaagttgttttaccaaatagttgtttagttagtacattatatgtctaaaatgtgtataaattcatgctgcttatttcatgggagtaaagaaatatgaccatgtgtgctcttcccaacctcagaatattctccttcaatcccaactaatttcaaagtatctactacatttctctctggcttgaatatttgtacatcacatccttattaactgactttttttttctctcttcatcctccttttcacaattttttcccctctttcactgccatcacctctgtggcattcttaacctttacaattaccagtgctagagccttctcagacaatgcttgaaagtgacatcagaagacaatatataaattttaggtaataagtgtgtgaagcaataggagaactattcccaccaatcttagttcccacttcctggagctgcctcaatcaatactccccatgtatggggtttggtggccttgccaactcagcttgtggaaagacggaagaggctttccaagttgctgagttacagcaatctctacttcaggtcaaagaagaaactagagggcaccaagatgaaaaaaagtactgattacctcttgggctgaccccaactctgccctagagccctcaactggtatagggaaagaagtgaagtgggttttttaattttttgttgtttttgtcctcagccctagaaaatgctacagacttttacaacaccttttaaaataagtaaagtcttttacagactataagtatatgatgtgtctatattatgataagtatataatgtgtctatattatgccgtatgtttctttagattattgaccagtctctgacaaaaataatccctttcccccatacaaaatgaatcagtcctcagttgcgtgttgaagtttatgcattatagatttaaatatataacatctaattccttgaattgtaatacacacatacaaatacttgtgacttttgaaatttattatttgttttccttatgtcatcagtgtaccttgagtaccattacaatgtgagactacttgatacaaagttttcacattctgagttgaaagaaagaaaactaaaggtgaaaaatcacatggtcatatatgcgactatattagaccagcatttattcaaaacattttatttctaagtaaagaaaattaagatattgttcttgcagcctaaaggaacaaaatacccattgaaaatgtttaaagccattttccagtccatattttagtattatttgatcgtatttaaattaacatgcatatatgacatattttagaaattatttgatggtaacttagcacatgatttttattaatatcctgatatttctcctattaatattgagcatttaggtttcagaaatgaagcaggagttattagataggaattagtgtacatttaaatcaaaatattttcatgtagttgtgtgttaatattttcagatttgctgttatctcagtcacaaatacacatctgtattcctttatggatcagttaacattataaatgataactttagctcatttctctaatgttttaatttctagaactacactaaaaaagccaaaagaatactttcacagtaattcatgacttgtctgacatgatgaagtaccacactcccccatctttctacaggtgcccctaaaaatgtgttctttacaactagatgggaggaaacttattttgaaacctcaagtaccaaatgtaaaagaaaggctatgagcacagtatcttataatagcattccatgaaagttttaaattggatttttgtgtgtgtttaaataacatgtcttattatctctgttaacaatgtacagctttttaaaaaccaaaatgaagactgtacttgttgtttttgatcagaatgaagacaatgagggtactgtaaaagaattgttgcaaagaggagacaacttacaacaaagaatcacagatgagagaaagcgagaggaaataaagataaaacagcagctgttacagacaaaacataatgctctcaaggtattagagctaaaattataatataccttgcctgtggtttttttttaatatatagggtaaaatataatgtgcattaataaaatctgcttcagacttagtcatcagaaactcactttttctgttcaatgtgtatgctttatttaacatttttgagtggtatttgattttgaacgatgtgttgcttaaaagttatggctttttaaagacatatttttctaagtagtaattgaaagatgggaatgcattcatagtacttatacatttaattttctaatgtgctttatttttatcagctactttatattgaaaaaaacctgcctaactgccagaataaccgatctacatgtatccattattcctgctttctttacttaattgattttgcttgcattaggtccaattttttggtaacctgatacttgtttaataagccctagattcttttatttatttttaaaactttattatgcctttaagaaagtcactctttgcaactatctacaaagtcaaatttcatttatgtaggaatcctaaaaaataatcttagtgcccttgaataagaactgctactttcatattaagcagtgtagtgtatggcttcaagtccccaggtgactcatctggtttgtgcaggaagagcaggataaacttaatttttctataataatatctaggaagttcttgagactagacatgtggaaagttttgtgaaactttttttttgtatatgctttgcaataatcactatttgcatgcatggctgattttctaatacttttaattgctgagcttttccttgtaaatcactcttttgagctatgtagttatgaaggtggatccacctagcaggtagatggagtctgctttctacatgcaaataagagaataaaacctttccccctatagtcaaccaaataaacactgctgagaatgtaattacacaatattgtgcctgcaaggaatccacaaggaaagtctaattggccagcaggtgttctgaaggtaactgctgataaatatagtaaacagaaaaggcctcttcctcgagggagtgcaaaagcacaccataatgtgtctagaaaatcggaacgctatgtaactcacacccttccaactgtgagcaagctttcagaagtatctacactggtcgtatgatggtgtgtgtcctactgaatagcagtgtttaatggtcatctggcattcctctaaagaaatctacatgacatctctaaatattttacatattatacatcactttgtgcttaggaaatgaaagatgtttcagattgatgaccaccaagccctttctcctggcaaagatgtgagttatgtcacaaataaggcatggctcaactctaattcacgtggctgtatcttgctacctttgaaaaaagcagcgttcgatctgactcctcagaaggtttgaaaattcaacataaaacataaagtacagcaaggtttaaattcccaattttaaacaaactagataatgaaatgtagttcattcttgcaaatacaggctataagtgattaatcaaaatcgtcaacactactcgccaaaccaatctataccaacatattcaataactttttaaacctgtcaaatagttccaattctggtccttatgaaatattttagagaaggtcaaaattttccaatggaatgaaatttttagaaattccctgatatttattattttttcgctcgaattaaacctgtgaataaaaccctaattgctactttctgtagaaatgaaagctgcatgcagagcttatgttcccatgaattataaaatggcattttgagtaattctattaatcacagaagatattgagtgtgcttgtaaagagcatgatgactgatttcctcccattgttgatttattaaattagtcttatcacattgatttgaaagcatgcacttgctgttttcttttttcaaatagttaattgttttgcatttagagcatgatttggtatagtaagataaatgtggctatgcaagccttggaaggagaagcatttatctcacataattttttattagttatgttcaccaatatacgaacagtggtgacacttctacacatacagcttggaacagtttataagacaactaaaatggctttatatttctaatcataaaatattaatggcctatgaaactcttatgtaggcatttctaaaaacatgaatgtatattggttgagtacataaagttttgttgatgagccccaaggctaaagatatacattttagaattttacctattttaagtcagatacaaactcactaggtttgtgagtttgtatctagttaagtcaattgtattcgtatattaaactcttgcacataaactacacaacagttagctcattaagagtcaattgaatgtgacaaaatttttaagcaagtttgaacatgctaagagaaaatactttaagtgtgttattcaggtttcttagcttcctatacatgggtcccgcctcatgcataggcaatttaattatgtctttgtatattttgcatttaaatatgattttaacctaagttgtacaaaaagatgagggacgcaaattattttgataaataactgcagccagaagtgcactatacatatatattgatattttaataatgtctgcaccatgaacaggatttgaggtctcaaagaagaaaaaaggctctagaaatttctcatcagtggtatcagtacaagaggcaggctgatgatctcctgaaatgcttggatgacattgaaaaaaaattagccagcctacctgagcccagagatgaaaggaaaataaaggtaatgttgttttagaatgtcaataccagattttattatacagtttaattaacctgtgaagatcatatttaaaatgttgatgttcttgtttctattaacgttctctttgatttgatgcatttccttgtattgtgtgttgttttcagtaaatgtattgtattaagtgttattcaattgacgtaatgttgaatgaataaaatgttttagactatgtaaagtgatttaagaaatgtgatgtgttttctggtaaaattgtaattgactttgtgtatctttgttccagatgaactaatgacttatcggtatatggacgacttcttactcatgttagcccattcatttcatcagagcatcttcacacatcagtgttcactctctatagatttatttgcatattgtctaaatatgtttttttctgttattattttacactttttattttgcttcattctctgttgagttcctcaaacctttaaaaaggaaataaataacttattcacttaccctctaaattatattctatgtggacggtccctaataaataatgagttatcactccaaattgtttcaaatcccaagacaccagaggaatttagaagaaagaaaatgttagaccaatttcaatatttacttaattagaatatctaaaaccaagcattcaaaggataactgaaataatatttgggttattgagcgaggatgacagtcatgcctttcatatttgtaaacttcaaaggatgacaataaagggacaacagcctttgaaattttgagagaagtatttgctgcttgcaagtcggttgatgtggttagctaactgccctgggccctgtattggttttgctcaataggaaattgatcgggaattgcagaagaagaaagaggagctgaatgcagtgcgtaggcaagctgagggcttgtctgaggatggggccgcaatggcagtggagccaactcagatccagctcagcaagcgctggcgggaaattgagagcaaatttgctcagtttcgaagactcaactttgcacaaattgtgagttgttactggcaaacccacgtatgtgtttgcaactactactctattaacagaggcctactaataaaaaaaaaagagacaaaaaatctgggtacagttttaaacttctaatgtacattctgaaagtgagtggtttccctcactttgggcttctgtaacactagtgcttaattttgccaattaaagacacaagaaattaacagataacagggaaaaccccttatcaaaaatgaaaatacatcttaattttttttgctacatcatttttcataacattggcaatgttaatttgtcaatttatcatacattcactttacttcaatgtctaatccaaaaaatatgtattgctttcctgagatcatcccatgctgattttactttcttaatgtatacatgataaataataaatatttcatggtacatcttatgtcaacctgcataagccattatctcattgacttgaagaataatagcttaatcctcacacctggtttaactacttaatgggttacagtgcccataaaagaactggatgcctagtaagatggttgctaattgattgcagattgaacaatatcagataatgttattactgaaatgttaccagccaaaacaaaaaggagtgactgctcttctttcaaacaactgaatggaaagtgtatggttctctctttaaaaaggcgattcagaattgttagcttggtctcacttctttatttgtagtaggtataaaccatagaggttttctgacaggtacatttttgttcctattattaacacttgtaagatgaagaggaatgatcatcatctgtaattatagaagaaagtactcctcacaaaaccaggatgtcaaaatctggaaactaagtctttatagttaagttaggttgaattatatgaatcaaacagatactcaaccattttgccctatgtaaataataactgcatagggttcagcccatgtatgagacttcttgggaacttcttctgtgatagtgtcagttccatttaatttggtgtatatttttaaaatgtcaaaagcagttaccataacttaattttataagcatataagggaagtatgttgcatattattgtgacttcttttaatacttcaagaaaattaataaatacactgttttctgttaaatctaataccctaaagtttaatagcaggtgaattattctgagcaattggaagaatacgagaaatagcgaaactgtattgcatgtgaagtctaattccacctggctgaatgtttcagcctattatccttcatattagatgttatgaatgtaatgtgtcataaataaccttacactaaccagcaagcctgtgtctgcagatgcaaaatgaagcgaaagattaaggcaatcaaaaagaaaattctaataaaatagtttcacctcaatttaatagatcattcaagggggagtcctttgctttgaattatctgactactaactcatttctccattccaattttccccaggtcttgacacacccaatatgcaggtttaaaattcgttacaaactaatcaagttgctaatgctttatggctaaataggcacaggatcaaaaatctccataaaccacttacttaaaatgccattatgtccctattcatagtaggctctcaacaaatatttgtacaacgtaataatgactggtgaaataaaggaagcatgtgtgaaccagtatatatttttaaaaaattgtagtaaaattctgggatatattttcctcataaacgatttattcttaagttttatatattaaagatccaaaattcagaatgtgaagggggctatttttgtgttaactcttaattatccatgataataaagtaatcacaatctgtatgaagaataatcaatttaatattgcagttatatttggcatcgtattttaattagaactgagggataattgatagatgataagtaggtatataggttggtaggtagatagatagacaggtgggtgtagaaatattcaagatacatctttatacttgaccaattgtcaatgcattttaaaactaatttcactgtggccactgattagagttatctttcccaattcttacgccctagagtcatttgtgatagtcacagtaacagcttaatgaaaagtagtatttgatataaccttacaatggctctgatgcagcatatgccatagcttcagaatttcttacctccccctatattctccttctctaattgtttgatttttacttttcctaactgtccctttttgtttttctagatataaactgtaggcttaaagttcatctttcatgtctttacagcaacatgttgaaatagtaagcggtactcttaaaatgcttagtatgtgagagctgagtgagtttaaaatgaaaaattaattttccttatctcacagataaagactcagagaagtgctaaccactgtaaaattaaggcatttaggggactctgtccatgtcagagctatatatggtagtaataaagctcagaaaaggactgagactttgagggaacaatcatgaggcagcgcccagccacacaggaatgcagaccaaagcatagtagagggtatctgcaaattgtggtcctcagggcaaacctggagatgataaagaaagaggcatgagactgggaggacgcaggtaaaaattttaccagatattcaaaatgagagaactcctgccttaattaggaattccaatcatttctaatatatttcctgttggtttagaaactaggttcctcagttaagaccaagcacggactgtaaactgaggaaaagggatagttctataggatgtactatcacagcagtgtggtctagtaaaattaactcttggataaacagccttgaatatgaatcccagtgactttgagtgctgtatgatcagggataaactgagtctcatttacttcatctgtacaatagagataaggatgtttctgaggattaaataaggtaatatttgtcaaacacctgctgcgttatgcaggctcaatgcatgaaagttttcttcgtctcctttctgtatatatattaacattggaaaatagacataatctttaatttttaaaatattttcataagtcattaagagaattaagtacgcagcatttgtttaaaatgttaacaacagatatctcgttcagtgaaaatttcaaatttaattctataatatataagcagatacttttctctagattcacagaataaacacaggaaatatcacacaaatctgatgactgccaagaaagggcatgattttccctaaactgcccctcacatcattgtagcatttggaaaataacctcagagagcccaggcatttgcaaacacaaaattatacaatgaagataccactacaacccccaagggtcatgtgaaactgctaaggaacataagcttacaaactaaaattatgattattgtggaaaaaaattataagcaatgttatcagatgccaaacgttaaaaggagaatgtatacctgaagaaaatagagataagaggataatcaccaaaggatattaagtaatttttaatgttcaaaaataaaaattaaatggatttttttccagtaagaataggccattatataaagtgaaaacgaagatttgaaaaaacaaagtctggaaatgaaaatataattaatccctcaaacatctgcgtgaaataagtttcaagttgaaaaaaatagggattatggggaagagacaatatttcatattaatgaaatttaataaaatggaataaatgtaaattttaatgaatcctcaaattcaataaaggtcaaccaacgtggaaaaaataaaaacaagtctaccagctagctctgaatgaaactcagagcatcagtaatcaaaaaggtatcattaagggttacttaagacaaaagaacatttacaggatgacaatattgactgaagacttttcatcaacaatagatattagaagacagttgaataatatcttcaaaatgctaggcacattttcaaataccaggtaaaacatgattcaagaattaaggcaaaatattctcagacatacagctagtttcacctgaacaaaaactaagaatttcttgtctatagatttttgctaaaataattactaagcaatatatttgtgtaaaataaaatgaaactagaaggaaggagacagcgatgtaaagctgtataaaattgttttctctgtaaataagaacatttattaaaaaagcttataatcctaaaatttggtcagtgccaccaaggaaaacacagaatactaggagaatgcagtgtttgactgatcctgtgtaaagagagagaaatcaaatagaagacttattgcatatcctatgaattacatatccttaattcatatcctgcatattacatatgctatgtaaagggagataaaaacaagacttattcgagataatggcaacaaatataaggcttgtgcataatgtgttctatgtaaattattaccaattataatgtttctagatagcaaaaaagtgctaaacctctgaaatatgtatacatacatgacctttccaagaacagcagcaaaaaaatacaaaaaaaagcccacttcagtgaagaaaaagaaatgtccattttctaaatacatttccacttgagctgagcatgttatgacatcaaataccaagtatatgatcttgatgtttaacattttatatccaacagtctcttatcttggatgcctaatgagcatctcaaacatacaatagccaagtgaaaaataaatgatccaccccccatctacgttaattggcatctaccaacatctccagatgttattaaattgcactattatttacttaagtcagaaacctagacatccttcatgattcttttctcttacattaccatgtaaattatttccactcttgttggatatacctgcaaaatgcatcaaatcactcctccgtatctgttatggaagtgctaatctacaagattattatctctcatctggattacttcaacaacctctaacctcttcttccagtctttccccacttacaccatatttctcctggtgaaggcagagagctccttctaaggagttaatgagatcatatcaggcccctcctgcccattactctttaaatgaaatcctgtgatccgctatatgatgtagccccttcctatcacttctgttactcacactttgtctccctttttgctcttctgctaacatagaggcctaaaggtttcttttctatacttaaacacaaccaatttcatttccatatcagtatctttgaacatatttttctaatggaatatttttcacctagaattttgcataggtgctataacttatttagatatcctttcatttaggaacaatgaatatttagtagaactttgatgtataatctggttatgtaatgtagtagtttctgttataaatgttttatattccctatacttatgtatgcaaattcggagtttaagactgctcgttcagaacatcagtttctcttacggttacttctagaagtaggcatactaaggaaagacacagcttctggaacataaaagtgaggtggtaaaagatgaatatgaagagggttacaatattgtattgcaatggatagcttgtcctacagcagagtaattgtaatgggatattttgacaaaattaaagtacacatttccaaaatatacatgctcttggaaggctgatagaaaattaaccttgtttgtagattaaatgctgcaataaatgtgttatttaaaatagtccttggctgggcgtggtggctcacaactgtaatcccagctctttgtgaggccgaggtgggcggatcacttgaggaggagttccagatcagcctggctaacatatataacatgtcatgtatatatatgacatgctatacatatatacacatgttatacacacacagataacatgttatacacgtatgcacatgttacatataacatatataacatgtacgtatacacacgttatatataacatgttatacacacgttatatataacgttatatatacacgttatatataacgttatatatacacgttatatataacgttatatatacacgttatatataacatgttatacacatatacacgttatatataacatacacgtatacacgttatatataacatacatatatacacgttatatgtataacatgttatatataacatgttatacacatataacgttgaatataacatgttatatatgcacgttatatataacatgttatacatatatacacgtgttatatataacatgttatacatatataacgttttatatatacatgttatgcctatatacacatgttctacgtatatacatgttatatatacatgttatgtatataacatgttatatgttatatatacatattatgtatatgttatgtatataacatgttatgtatatgttatgtatataacatgtttgttttataatgttttatatataacatacacatgttatgtatataacatgttatataacatatacacgttatatataacatgttttatatataacatacacatgttatatatataacatgtatatataaatgttataaatacatgttatatatacatgtatatacatatatacatccatatataacatatatatacaagttatatatatatgttatatatatgtattatatatgttttatatataaaattagccaggcttgctggcagttgcttgtaatccaagcttctcagaggctgaggcatgagaattgcttgaaactgggagacagaggttacagtcagcagggatcacaccactgcactacagcctgggcaacagattgagaccccgcctcaagaaaaaaaagtagtccttaattgaataaatttgtaaaataaacacctatatattgtgaatatttttccactaacttttttaagttgtttgaatctgaatagtattatacattcacaaagagttttcacatgcatctagtttgatcacagtaatgaccctctcaagtatcattttctttgtcattttactgtaagaaaaattagcataaatgaggttaagagatttgtccaaggatacatctgagaaatggaagacgccaaacttgaactcactgctttccaaaacatggtgggagttattaataaaaaaggaaaaaagtttcagtgtttaaacaattttggtaaacagtagattaagcaaactttccttactctataactttctagtgcgtttgatatgctaatgggattatgactttctatgaaggggttagattctatagactttcacatctagacagttgcagtagaaaagggaaatttgatttcagattgatgaaaggtttcttatttgagtgatggtgaaataagaatattctttagaaaaaaatgggaagaacatcaccgtatcattattcttctgttgtttgggatttccttaaatttaagcagagatgtacaagaaaagtaataacagaactgtttgccaccaccttatgtaaaataatgtctgagcctagatttaatggtctgctacacattttttatattgtctcctatcttgtaataaaagcaactcattttgagaataaaattaggggaaatatattgtctttgcataattgccacatagattttcttctttgccttgaaataacaacaaagattgtcagctgccagtgcaacatccttggagaatttgggaagataaatgattttcttatttagagacagaatgttctttagcaaatggaattgtaaatacaaaagactaataatggttgttaagggaaatgttgcaccaggatgtagctgtttgtagaatttttctcctctcagctcaattttgtaattaacatattacaaggattaaaaaagaaattagctaacattttatgtttttctagattgttgatgatcatagtggttataaatatttgtacggagtttttttgttctagtgtctagttgtgtagcataatcagtttaatggttaagtagaggcatgttcagcgagtatcagcttccagaaagatgacagactgacttaattcctcaccccctcacttcaaatgcgtggaaattctgaataaaatataatttttaaaagttttaaatacacagctgggctatggtggaacctctcttccctctgtgtgccatgaatgatcaaatcatcttacgtgaaactgaacctggattgagagcctaatggctaggaagaagttttcaagaccttttaggacaaaatatgtgaccttcaacaacacataatatagaggtgaaaataaaacccctccttaaagtctgaattttcaagggcttccctcagctgtaaaggggaataaataaatcctacccacaatggagaagaggcattatctgtagtgataatagcttaggattttcaaaacttaatagaaattccaatactccgattgggaaactgagcaaatctgaagcagaaaagattattaaaaaaaagaaatataagtatagatcatcactatgagacgatgaatctgatgaatccaaaaaaagcaaagaaataattttaaatactgctgtatttccttagaaagtagtgacacttaaaatggtacctggttttagagcaatgatagaagccagaagacggtagaataatattttcaaaaacaatgaaagaacatccacgtaggaacctagaattgtgtactgatagaaactctctttcaggaataacattgaaataaagatcttttcagacacacagaaaccgtttactagcataaaattccctttagaggacgtcaagattggtctttaagcaggagaaagatacaagatggaagatttaagctgcaaaagaaaatgatgtgcaaagaaaatggtaaaaaaatggaaaagtcttaaataaacatttaccgtgtatgaaagtgtctattaaaaaacagaaaaatgctggacatcaatgaaacatgagaaggtggttaagtttttcatccagtttacctgctacctttctatgtattgtttctcagtttccataggtagtacctacttctctaatgctgaaatgcctcagtgctcagtccttgggcacttgccatttttatttattctatatatgtcttgctgttttcatccagcctcgtgacttgattaaaacaaaattattcttttcccctcaaatgcagtggaagcaccgttctttcaaattttcagagaaaaaaaaaaatctacgcatgctttctttagcctatctctacacaatacacagggacaacatttgaaaaatataaaccatatttaaatctgatcataatccttcaatgaattcccatctatttttaagtgaaatccaaaactcttcatgaatttcaagggatatctgacctggctggcccacttcttaactcaggccttatctcttaatactttcctctgctccacctatgttgacccctttgctgctgctttcacagatctgacatgcacccattgcattgtgtgctacctctgcctaaaataatcctcccccgtttctccatgtggctcttttcgtttctgccttaacttctttactcaaaagtgtttttttcaatgaatctttctcatgtgtgcacatacaccacacacacacacacacacacacacacacactttttatccatgctttcctcatttatttttctcaataaagtgcatgaccaggaaagttctcaatattttccttctttatcttcttgagtatttatttccctacctagaagtagagctccaacccaacaatgcaaaaaaaaattgtctttttttcccactgctgtgtcctcaacacccaaaacagtgactaggtacacagtatatatttgtttaattcataaaataagtaattaatcaataatgaataaagcaattttaagattctcttagtgcttagaatgaaaacttgcaaaatttcttgtgcgtgttaagaattttatactaatcattaaatcgatagaagtatacaatttttgaatagtagagggaaaaataaagacaagctattaagttaaagcaaataatccaaatagaaaactgaggtttaagaacattaattgaattcatcaagggtagtaagaaactatatgaacataggattttgtgttttccgaatatctctagtccaaagccatcactatgtataaaataagatgttaattacagtttaatattcttgtaagtttaagcaaatttaccatttatacgtgatttatacaacatattacctcttgaatattgtctcaaatgactggcttcaagtagcacgttaaataaaaatagtagaataaatgtgtcaagctacacttactattcacaattattttatagttagattatggctctgttagatatacaattttatatttgcttatcttctgaattaatgttacagtaatagactacagtcatcatgcaatgtgttgtcaaatatattaataaacataagaaaaaacatagtaatatactgtgtcaaatttttctatcaagtggaaatttagcacattcttcaggaaatattgactgcaaaatctatgattaatatatttttcagaaatattggatataaatacaaaatgaagtgatgaattattgatatgtgcagttttactatcatataatgttactgataaaattaaaaaaatataactcatttttagcatcagatgaggaaacttggttcactaaagttagtattatctttatttgaatgctacaaccttgaaaaattattacatttgatagaactatttgggaacagtttgttacttctcattgtgactatggacattaatgggatgcccatattccttccattcccttttcttagcatagtggaaatgattacagatatcagttatgtttcttgactgatgttacagtcattccgcattatgaagtatgcaagactaaatttttacaaagggtatctcttatccttatgatagcctaaaaaggtgaaaatttgtcaagcaggtttcctaagatcctataaaattaggggacagggttccagcatcaagatgtagttttacttattgaattaacacagagttttgttgatgattttctttgatgatgggggtagtgatcgtggtattgttttattacattggtttcttcctttttttgttcatttttaatgggaacctcccaataatggtgaggatgcagttaaatggtaactccatacacttagtgtgagtctagaaataaattcaagttttattttgaatacactgaattggtatttctttcattgaataaacatttatctagtgcctcctaagtgccagacaacacaaaacgtaaaataccattggcaaatccatagcaatcatacaaaagacgtgatatttgataaatataactcatacaatgaagaaaaaaaagaacaagaatttatacacagcaatttgacctccgtttgcaacacaacaatataaagtgtaattttctccaatctaaatttgctttgaaaatatggaacaccagctggaagggagctcagatggcttctgcagtggggttggaaatatccttctgagcatgtccagaacaactggttaaaaataattaaatcacttgcaccatctgtgaatcattctgattcttcaatgattacttaagactctcattgtatggaacatattctgagaacagatgaataaaatctattcaagtgtatattgttttccactttgattttcacaaaataaaaggattataatattttcaagttggtaagttatctgataattctcctgccctcctttatgatccagttgcttttgaaataattaaggtttgtttaaaatttagttttatgaataatacaaattcacatagccttgatgttataacataattttgcttaaaaacattctatcatttttaccctttatttaatcttttgagtatagtttagcacccatttagtaacagccaagagaactaaatggaagtccgaattgattgcattctcaaatttagcaccatatgctataatcatgagcagtttttaaaattcctaaatagctattttaacgcatgtaaaacagaggaaagctatatttagtggtgactaatccatggatgaaagatgcatggattaaatataatccaagtgcccatatctgtacaaacttaagatgttcagataatttggaggcattgttaactgtttttctggatatcagtgcatgggcacttctcgccagaataaattaactggggaaagttccagaaggtccataattttccataataattagtgctttcttagttaatagactatctgggtgatgaaaaataaatgaattacctaacaaatacagttatctataacatataactccatctgtgacccgtataaagctcaaaatgtgttaactggttagtatctagacaatcataaacacacatgaaacatgaataatatcggtcactatattttcatttcttgcttcgtagatacactcgagtatttcatatgtggaaaattaagagatctagtcctcttcatatattggcctccctaatgggaaagggtctctttaatctgctacaaagccctcctcttctttaaacttgccaagatgtcttctacctcaggtcattgcaattatgtttcctttgacttgggcctctatttctggatatttccttgctggtctcccgtcacattgcaggatgcagagtgaacattatctccacaggtggcctgccttcgacaacctattttatgtcgttcgccacatccattctatccttaccatcatgctctagaacatcagctagacgtttcccttctaatatttactgcaatctgcaaatgttacctttgcatgtttacttgtttataatttgtctgctatcattagaatgtaggcttgatgaagtcaggagcctattctatcttgttagtcactgtttccccaagacatagagtctatcacagagcaggtatttaatgaaaatatgtggaatgaatgattgaatgaatgaatgtataacatcttcctgtggaaatccctgcagtttcagagttggttgttctgtatttttatgtcagtggtatcctaatgccagtctgccatggtccagaagttttcaatggtccataaggaaaagaaaaaaaagagcaattttttatttagcttttcataaagcaaagttttttaatgcaagaattgtcctttctttcaaaattatgggtttcaacagttttggaggtattaaaatggcctttctttttctttcttctcattttgttacaatgtcctttactagaaaaagtaaagggcagaacttttgtgatgttccctaatagttttttttttttgtaatgttgttattgacctatgaaatacaatgtccgtaaaccaccaacttagataaatttatttacatgaaggaataccattcctgctaagtttctatattggttgcttgaagtttcagaatgaggaagagaaagcatgaaaaccatcacctcctatatgtatggcctgttcggcaagcagtactggccccataacagttatccactggaataacattcttgaatttattttgtcacatgtgaggagcaaaaacaagacaaaatacacaaaaaagagtagaattagggtatcacgacatttgtctaacattgttcaacgttaacacttacaaataataaaggtaccaaaatggtattttcttgtgtataaatattttcatcctctggatttgaatctgtttttgtttgttttggtgatataaagaactcataatagtatcatttcctgatgatatttggaatccaaaaattaattcaaaacagaagtattacattttctgtccttttcataattgtaaacaatgcatcaagatcaaaaacttaacaaaatgcgttaatgttattatgcatgcttttttcacattctttatttcccagtgatcataatgactaataattaacataattatttgtgattgacaaaagactctaacgttcatcattttagttaattattatttaagaaataattggtctggatataatataagccaattaaatttgtattctgaaaagttttgagaagtgaaaaaaaatttattttttatttggtaaaatactttatttctgttgtagctgcttttacaaggagattgtggggaggaacagtcatatccaagttctcagttaattaccttttcaaaatatatgatctaaaatggagtgaaaattgattgtgtcaatatgagtttttagagttaaaacttgtaaattttctggacagaatagaacaattttatattggaatccttgccataggataatacaatgactattatttcctggaacattgacagagaacaagctattttaggagaaactatctggattgtaaagtagagcacattaagcctaaggtgtcattaaattcacaaaacttttaaaaaagaattgagcgtaatctttggtaagagaaaaatggttttcttcagtgactattaccatattttgcaaagttataacctggcaaaatatattattttgggaaaataatattaaatataaccatttctatacacacagtggcactttatttattcagaggtcagatggatatcattttaatttacctgcaacacagccaagagtcaggaatggagtagaacaaaaggcctctcgattcccaaaattgattttttaaggttcatgaaatccaaagcttacttatatttcattatgaaatgaatttccaaatccttttttggagattttttaaaaattttgctttgattaaagaggtaattctaataaacttaattatctctttttttttttgtgcccctagtagctttgaagtcaaaatgggacagaaggaataaatgactgaaacaggagataatagctgcagcctcgagtaaggtgaaaaagaacctatatatatggactcatagtttggggaaataatttagcacagggcaacacagatgagagagggagggatggaggaagggagacagagagagagaacagataattagtgtttatttcattttatacttatggataatttaattatttcaatagtttattcatatagttaggtaaatactttttttttttttttgagacagattctcaccctgtcacccaggctggagtgcagtggcatgatctcggctcactgcaccctctgtctcccaggttcaagtgattctcctgcctcaacctccagagttgctgggattacaggcaaccgccatcacgcctggctaatttttttatttttttagtacagacagggtttcaccatgttgtccaggcttgtcttgaactcctgacctcaaatgatctgcctgcctcggcctcccaaagtgctgggattactggtgtgagccatggcgcccagcccaaggatctttaatatcttacctatgtgcaaaagtgtttaatacataatgccatatggcatattagcttcctaaatcacataccactgccaccagctaacttatatctctatatttacatctgaggctgcataggcacacataaatgtattcatatatgttacacatatgcttatttatgtagctatgctatatgttatttgctatttacatctattaagttacttagcaaaatatgtcctttggctttgaaaaaaatgcctgctgaactcatcaagattatgatttttgtaggttattctccatcttttagtcgagttcctaaagttgtgtttttttaactgcctgctttttattgcaggtatatgaaattgttgtgcatatttcaaagaagaatagaatgcagggtaactctcaaacttgttatttggaattaggtcagataattttgtaaatactgttatcagtatatcacaatgtcattagtgtcccttcaagttaagggcatggaaataaagatggtctaatgtgccaggccaaagaggaaaacttttcagcttagcaaagtgacttcaaatacatggggagaattgaagcagtcatttcaaatgcaaacaaaaagttgtatttttatggattacaatatccttagctaaatgtttactttggcttgggtatttttctcattagtgatacttatttaattagttgcttataaattgaacctgggaagtgtagtttgcagtgagccgagatcaagccactgcactccagcctgggcaacagagcgagactccgtctcaaaaaaaaaaaaaaaaaaaattgagtacttaagatcaattaaaatatatcgagtattggatgctgtcacataagagtgctattagccattggctgttaaatttcctcatctccaggaatctcaggcacctaaaaataattctctttacttcatgggcaacagcagccactagtctttgccacgactcttctgtcaattgggtatgcagtgaggggcaccaatatggttttaggtgatgatgtgaaattgtttcaaaatgctttcattctcccttctgaattttgtcttagtctatgcttccataatattgggagccaattagtagtacatgccttcctgcagcttgaatagaagtgaagtctattatgaacaataaagtcaattagagggggccatgcctactgataaatatgttatgtaaagactcaatttaccttgaaatctgtatctatttgcatctactctttagtgctagttcagagctctgtgcgattattttaaatgtattgcagtattactttaatcaattaatacaaaggtagattaaggaaactttactactcttcatttcttcattctgctgattcctccctcactgaagcaaaaaaaaagtctacaatttagtctttaaaaagtctatagtttagtcttagatatctctttgtactatattccatatactgttcattcttaccaatgaatagtatatatagatatattttacttttttaaaaaatactgctttattctgtgtattattttaaatataacagtcaattagaaacatgttcccaggtaatgtatatagatcttatacattctttgtgaaagtcttagatgatgaatcaaaatgtattctattattcttctacatttctggattattatattttgattagaaaaggtggcctatcaaatctttctttttgatgcttttaaaagtttcctctctatgtaatttttgatgtcccaagtaaataggagaatatgctttttccagtgtgcacaaaatacggattaaatttagcttgtcggttttaaaccacctctattcttgttttttatttgtattttttgtctattttaatctaacaaattacagaagagttgtatgtaaggtaccaactacagctatgattttatcatgttctccttttatttctagtaatttttaccttatgtagaatgcacccaattgtttggggcatagcaattaatgactactgtgctttgggaagaagtgtgatttttgtcattacaatggttctctgagacccatttagtgcttttcggtcttgaactatacttcatttgatgctattattttgactttcactttttaaaaaatggttttctaaatcaccattaacgcagcattgtgaccttgtatttttatgtttcttgtgactttcactttttaaaaaatggttttctaaatcaccattaacgcagcattgtgaccttgtatttttatgtttcttgtaaacagcctatagatggagtgtgcattttaaactagataattttgtctttttaacttatgcaaatatttttacatctttatagggtacatgtaatattttgctacatgcatagaatgtataatgattaagtcaggatagttagggtatccatcatctcaagtatttatcatttatatgtgttggaaatagttcaactcctctcttctaggtattttgagagatacaatatattgttgattatagtcaccctactcttctttcaaacattagcacttactctttctatgcaactgtatgtccgtacccagtaaccaatctctcttcacccattccgcccacctacactcttcccagcctctggtatctataaaaaaaaatcacatattcttaccaatacgtgcttgatcttatgaagatataaaaatgatagatagttcatctttagatgagacattttaaccaacttcatttttacaataactcttataactgtgtctgttttaattccttgtcatattgatggtcattattttatcattttatttactcttatcccttgtctataattttataattcatcatcttcttcactgcactctactgcatctcttcccgcacttataggttatttataagttatactttgtactatcattttactagtgctgtttcccattttaaacaacaattttatgcctatatttctgtagtgttgcgccaaaattaaataagaacaatgccctcatcaccaagatgatttacttagtcaactcctcattattttcaatcaaaggcaaaatcctttaaaaagaaataatttataattttatttcctggctactattgttttcacttgtagtatcacatactagttcaagatgtcatgttattacttaaattacactatcacttcataaaatttgaccacaaacgacacaaggtgtatttcctgtcactgtttttttgtaccgtttatttctcattgttttgaaatctttattacacagtcatccttcagtgtctgtggggcactggtttcagcattttgatatcaaaattcaagaatactcaaattatttatataaaatggcatagtgtttgcatgtaactatggacaccctcctgaacacttcatatcatctctagattatttatagtacccaatacaatgtaaatgctatgtaaatagttgttatgcagtattgtttagggaataatggcaataaaaatgtctgtacatgttcagtgcagacacagccatccatgtatttttgcaaatgtgttcgatcgatgactggttaaatccacaaatgtggaacccatggatacagagggccaactgtacttcagttttaatttggttggaacacatgagaaatgtcctcgtaaaaacataaaggatgtaaactttgtaaaccttgcattttcgaaatgatctttgctttgcagtcatcatgatggatttattggatagtaacattctttaatatctctcctctttttttagtagtctctgtaggttatgaacaattgtcttccagtttccattgttttcttgtttcaactatcttcaagctactattgtttccagtgtaaagtctgattctagtccaagtatcatttatttgtatttaaccttttttctttctctcaaactctaaagttgctgtctgtcccatctattgaagtacagaaatttcattaagatataattttaaatgtttctaaatgtgtccctgtttattattttattttattttattttgtttttatttttgagacagggtcttgctattgcccaagctggagtgccgcgatgcaatcatagctcactgcagccaccaactcctaggctcaggagatcctattgcctcagcctctttagtggctgggactacaggccatcagtaccatgactggctaatttttaaaacatttgtttgtagagatgatgtgtcattatgttgcccaggctggtcttgaactcctggaatcaagtaatcttctcacctcagcctcctaaagtgctgggatttcagttgtgacccaccacttatttaattcttttttgcacttgggtaacgttttaaataaccaattaatattaataacttctttagctctggaaaattttctattatgattgttttaattattacaaatcttccatctcttcttttttctcattctggtacttatcattgcttaataggtatcttagatctgttctctaagtctcttattttttcactattaatgtcagtttatttctatttgtctttaaattgtgatatacttcttctggttgactgtaaagaacccatattttatttttagccatgatcattctcttttctaagttgtctattgttatttaaaaactaggtaacaggctttctgtgctctaatgttaaccttttaatgtttctaattttatttttattaaatgtaccttccgtatcttctagtatactacttgtatggactctcagctttgtctttctctccagccccttgtgtcttctgaaaaagcctttgctttattttctctcatgcctaagtcaaagaatgtaaaatgtcttggcgcaaatgcagttaaggttttgatattttgatgcatagtgattgattgagaagcaacatggatactggaagttttgttgttgttgttgttgttttgatctgatgaataattatttaacaagctgaaacctattcacaaaatttacatatgggaaaacatctctgatctcatggacaaggggtggaagtaaggctgtcctcaaccatgtagtacagccactctccagtaatgcctgcatgaaacaaactagcaggtactgacccccttcttaagtcaaacagatctccttaaatcaatggtctccaacagatcattccacatatatacttgaaaaccatcagatccatcatttctgtctcagatcgtgccaagatacacataactttgaaatatcaccagttcatcatcattctctcttcacctgcaatttttttttccataatttgaggtcctgatacatatattcttctaaattgtagcagttagttgtgattatcttgacgttgcatggactcagttcaaagtgaaacagaaaacatatctacgatgtgatttacccattctcaacatttctattttgtgtgtctgtatttgcacagacacgtacatacatacatgtgcatatatataattaataagctttgaccatataaataatgcaaattatgtataattcacaataataggtttttaaattaattatcttcagagttgagtgagattacttacagatttaggctgtgtctacctgaaaacaaaatacagtgtattagcaattcagtaaaatcaattggatatagaataataacaaattagttgagttttcaccttgtgacattttagtttggatttagtagcctgtctaaattacctttgtgaaaaaactaggctacaagtattttctgatagatataataccagcattagaattattcatataatcttagttttcacattatttaaaatagaacacattgttatattttaataagcaatttgaaaaagaaacaaatctttctttcttgtatgattgccattataaaagaatattaattgagtgctcattaggtaactttaaccacattaagtactagacagccctttggacagagactgagtagaataaaaaacgattacagaacatactttggtattaaccttttctataaataaaatgtattgtcattctctagattagcactgtcctatagaactttctgagatgatggcaatgttctatatctacactgtccaataaagtagctattgaggctactgagaacttaaaacatggctagtaaaaacagatgtactaagtttttaattgtatttgcttttaaataatttagatttacatttctttcgtcaagtgtagctaatgactaccatacgggatagtgtaattatatgcatctttactatcactcgcatttctaatgaagagaatacttccttgaaaaacataattatgacacatgcatatttagacatagatactgagttgccgcattaatctagagatagtgtccacattttctgaggggtgtgacaaatgtaatatagaaataaaagtgtgagtttattctgaaaaatctactcaagttgacagatccacaaggcaacagaagttaaaagcgatataggagggtgaaatataactgcagtatttaaggtctttccatacttattttttcttgtgttacttttattttcacactgaattaagtataagtatgtgtgtgaggtggagggagggttcgatttgcttgtcaacatacaaaaagattgctatagcaagtattcccaagctgaaattttggaatagcttaaaataaaaaatatatactagatatgtaaacgaaaacttttatgagaagagtttgggaagagttatcaaaggttaaaatgattttttgaatacaagtcttctcatacccttcaatttgctaatagacattatgatacccatgaagaagctaaaatcagtatatcttaatatcgtctatatgtcattacctcaaataattgcttatgtttgtattcaagtataatgagtcagattagtaactaaaagacaatttaaggacctaagcacgcatgtacaatagcatgtagctaatgtgctatgaattgaagaaatgcgacatagtgaaatcagatataccttttaaatctatgacaataaagattgcattataaaatgaagaaaatattcctgtttgaattctgaatattcctaaatataaattataaatgtaaatcccagcaattgtaaccacatatctatcttataattatcctgttaagttgatacttgttttttcattaatttatccaacaaatatttttgataacatactgtatgctaggtactaggcatgagtctttgctgcatttattttttgctgccttataagttggctagggtgtataaccttatctattaatttataggttattttttggagatggttttacaaagcaggccatgattgttggtgcttatatattgctgcttatgtgttgatacttatcttggtggcaaccaaagcccttttctttctcttctctcacaggccatacttagtgactaaaattttatcaagttactaatttatgttaattctttgaaaatctgtataaaaatgcaaatgttgtcctttgaaacgaaagactttaaaccactataagccattaacacattttccagattcagtttatcagcttaatttgatagtaattgagcttggccctgaggaattaggtaaatttcatggtgtagaaagtcagaatccacatgaggcaggtcaatgagcaggtctgtccagaccttttacataggacactatttatacctggccttctagaagcagggtgtatttaaagactggcaaatccagcatcatctgcatatctttttcgctgacagcctgccctgctttaaaaattaattctaactttagaaaataaataatatgggcataaaggatgattttctttcatattttaccttgactattttgtgtatgttagtgagttttattctttttaaacaaagggggtaaattgttcattgattctgaataattattctgagatggacaggccctttttttggttacatagcttcacataagcaattttttagatgatgcaataggaagggggaaatcacataagagcaaacactctctcattgctattttttctatgcacggtcataaccaatatgcttagactcattagattgattattcaacatctttctacccagtgacttgactaaaacagacaaaacgaagtactgtcagaatgctgttattgtcatgccattatatgtatccaaaacagtgacaacgcagattaaaaccatacccgtctcacctgcatcatgttgttttgtttttatgctttattgtttggggttttttaatcaccctggaccaatacaatatttttgcctaatttgtttgtgatttgcatttttatgcttacaatgcctattataattgtccaggagaaataaataaaaaatctctcaactttgtttattactgtaatgattcctagaaggaaacttgtctttctctgaagacttgtggggctaagagacagagctacttgtctaagacttaagtctttcccattgccttttcatttatgacccatcagaacctacttaaagcctgcagtcctattttggatttacatatcattgtgttattacttttaaataatccataatatttaagaatgtccctttgaggaaagataatcagatacaaactgacatactttcatattatggctcatagattttcatattatagctcacactaaatcattaataaatcttactttgaggatttgcttattttcatcttcattaacaccaacgcagttaaaaaaaaaaaggctccatcactattttactgtttttggtcaagataatagtctatttttgttacacttttgatgcattgatatatttttcatgtgccatatttatatgagatatatagttattttgtggcatatgtcataatcatatgtcatatagcacatttttcttcttgagtttctttgacctcataactcataaatgggccagtaacctcaatgcatttaaaggagaaagaagtcttttaaatcatggaggaaaacattttgtttaaaaacctagacataatgcaccatttgtttcaaaacaggattgcttttatcctttgcagttatggcccttcaagaaacaaattttatgtaatgaaaagaatgtgataacttaagtttcagatgaatgaaaatgtattcaaaactttgtgagtgatacctgtgcctatttacacagctcagaatcttaaaactgttttgactttaagtttagatcatacaaatcataattgtgttctataatagtcattaagcattgatcgaacttttcatttttaaataaaaataggcattttatggtttctttcacatatctttttgtttctagaaaatgaggctagtatattctttggggtatatatggttaaaaatgaaaataaacacaaagaaataaaatgaattaatcagattatagcatttccttgctaatgatgcatgagtatctataatgatataaggtggtaaagaacattaacaaaagcaagttgattttcaaaaggttagacgggatttgtacacatcagaactcagaaggataaaattattcaaggcagagttaatgaaattcaaatgaaaaggattaatctgaatgagtacctggattttgcataaagaagagaaaatgaacatgatatttctaattacactgatttttaaataactgtctgaaatttttattaaaccaaactgaaagtcattcaatggatgtagttttctcattatagattcgcatgactgtgtcaataggaatgctatacttttaaggaatagatagcaaactagatctccaaatgtctggttctcttttgattcaatttctggtagtttcttgtatatgaaaattacaaaaaagtctatatattaaacattattgtatatatcagattgctataataaatgagaatattcaaacttaataacacggaattttctagaaaatgagttcacagtttcccagtggtgtcaaaaagttattttggaatatttctatttctcaagaaagttcacaggatcaacccttagttttctctagtcagctgatctgtaccacttagtgtctgttatctgtgatgactggacactacgtatcaagatagtaaatctttcaatagatccgtcttcattaaatatatttaaagtataacattaaccttttagactttataacgtatagctgaactgttgcccataggtaattgtaatgagaagcatcttagaaattacaggtattctaatttatctttataatggaaagaaaaatttttgaaagattacttaattatcagtagttgaggatagaaatgatttttctcattcagatttttctaaagtaataaactatacctttttattgattatgttcaaccataagaattttaatatttctaagtgttctagaaaatgtgttcatgccatggctgagcatgtagggattatttccatgtattgacactggttgctctatggcttatttgtgacaatcttgaaaataatcacaatatgcatattattagagcattctcaacctgcagttcaatggctaatatttcttttaagagtatttcgatcaggttaataagagcttcttcattatttaaaagtttgtaaaaaatgatttctagaaccagatacagaattacaattatttgtcacttaggtatctaaaattttcttaaaaattgaactcttgtacagagagtaaaaggatgattaccagaaaaattggcaatttaaatagatgccacataacactcttctaaaagagattttctttgaaagataggtgaaaatggtttttagtttaatgttctgaagaatatttgttaaatcggtatataataatctatggtagacacatggggtcaggtggagagaagcttaacagatgagaagccagggtatggtgtgctgcctacattctttaagccctggtttaggactatgattaacactggatcttatttgctgagacacagaattctggtctgagagcacgaattattattttctaagtgaatctaatttttattttatccagtgtcactgaatgattttttctttttttttttaattatacttaagttctgggatacatgtacagaacgtgcaggtttgttgcataggtatacatgttccgtggtggtttgctgcacccatcaacctgtcatctacattaggtatttctcctaatgctatccctccccttgccccccacccgccaacaggcccctgcggccatatgttttcattgttcaactcccattatcagtgagaacatgcagtgtttggttttctgttcctgtgttagtttgctgagaatgacggtttctagtttcatccatgttcctgcaaaggacacgaactcattcttttttatggctgcatagtgtcccatggtgtatatgtgtcaattttctttatccagtctatcactggtgggcatttgggttggttgcaattctttgctattgtgaacagtgctgcaataaacatacgtgtgcatgtgtctttatagtaggatgatttataatcctttgggtatatatccagtaatgggattgctgggtcaaatggtatttctggttctagatccttgaggaatctgcacactgtcttccacaatggtggaactaatttacactcccaccaacagtgtaaaagagttcctatttctccacatcttctccagcatcagttgtttcctgactttttaatgatcgccattctaactggtgtgagatgctatctcgttgtggttttgacttgcatttctctaatgaccagtgatgatgaggtttttttcttatgtttgttggccgcgtaaatgtcttcttttgcgaagtgtctgttcatatcctttgcccactttctgatggggtcttttttttcttgtaaatttgtttaagttccttatagattctggataatagccctttgtcagatggatagattgcaaaagttttctctcattctgtaggttgcctgttgactctcatgatagggtcttttgctgtgctcttcagtttaattagatcccatttgtcaattttggcttttgttgctgttgcttttggtgttttagtcatgaagtctttgcccatgcctgtatcctgaatggtattgcctaggttttcttctagagtttttatggtttcaggtcttaggtttaagtctttaatccatcatgagttaatttttgtataaggtgtaagaaaggggtctagtttccgttttctgcatatggccagccagttttcccgacaccatttattaaatagggaatcttttccacattgcttgtttttgtcaggtttgtcaaagatcagatggttgtagatgtgtggtgatatttctgaggcctctgttctgttccgttggtctatatatctgttttgctatcagtataatctgttttggttactgtagcattatagtatagtttgaagtcaggtagcgtgatgcctccagctttgttattcttgcttaggattttcttggctatatgggcccttttttggttccatatgaaatgtaaagtagtttgttctaattctgtgaagaaagtcaatggtagcttgatgggagtagcattgaatctataaattactttgggcgctatggccattttcatgttattgattcttcctttccataagcatggaatgtttttccatttgtttgggtcctctcttatttccttgagcagtggtttgtagttctccttgaagaggcccttcacatcccttgcaagttgtattcctaggtattttattctctttgtagcaatttttaatgggagttctctcattatttggctctctgtctgttattggtttataggaatgcttgtgatttttgcacgttgattttgtatcctgagactttgctgaagttgcttatcagcttaaagagtttttgggctgagacgatggggttttctaaatatacaatcatgtcatctgcaaacagagataatttgacttcctctcttcctatttgaatatctttctttctttctcttgcctgattgccctggccaggacttccaatactatgttgaataggagtggtgagagagggcatccttgtcttgtgccagttttcaaagggaatgcttctagcttttgcccattcagtatgatactggctgtgggtttgtcataaatagctcttaatattttgagatttgtcccatcaataactagtttattgagtgtttttaacatgaaagggtgttgaatttatccaagaccttttctgcatctattgagataatcatgtggtttttttggtcattggttctgtttatgtgatgggttacatttattgatttgcgtatgttgaaccagctttgcatcccagggatgaagcctacttgattgtgatggatatgctttttaatgtgctactggatttggtttgccagtattttattgaggattttcttttttgttgtgtctttgccaggttttggtatcaggatgctgctggcctcataaaaagagttagggaagaatttattttcttttgtattgcttggaatagttttagagggaatggtaccagctcctctttgtatctctggtagaattcagctgtgaatccgtctggtcctgggcttttttttttttttttttttttggttcgtaggctattactgcctcaatttcagaacttgttattggtctattcagggattcaacttcttcctggtttagtcttgggagggtgtatgtgtccaggaatttatccattttttctagattttctagtttatttgcgtagaggtgttgatagtattctctgatggtagtttgtatttctgtgggatcggtggtgatatcccctttatcattttttattgtgcctctttgattcttttctcttttcttctttattagtctggctagtggtctatctattttgttaatcttttcaaaagaccagctcctggattcattggcaaatctcatttttatttaacgttcctttctgcaaataccaaaatagtcaaaatttgggtttgaaatttcatttaaggaagttaaatacaagttagcagacaaaagtgagtatattttgagtgtctttttcttcattatatttgaccatacagctaagtttcttgctggctataatccacaattactatatttattaagcaccaatatgaatttaagatagctgagagcatctcaaatgaaagtaatgaagactgagaaaactacatatcaaagaagaatcagaaaatagataaaaacatcttagaattatttttcttttaagaaaaagtgatgaggacatgcatcaaaacttttctgaattcccactgcttttgttaaggccacccagatttttttctaaatattttcaagatatgtccaattctgaaacaactcccttgattaaacaacaaaacaaattaataaataaatgaaaaactacaacttgtcttctacttactctgttcctgataacaaaaacctttgttttccaaaaacttacaggtgtaaaatgtatcattaaaggcagatttaattgcaccattaaataagtattataagaaatacgcttgctttagatgatgtgaagctatctttactgcaggggttatagcaactaacgtgaataagaaagacgagcttattaacttgtaaattttattaagaacaacataatggtcaccaaccaatgtaatgcgtgcaaaacacaagcttgtgttacttgtgctattgattctactgtttaatgtgtcagtgaaaatttcacattcaaatagcctgctgagttatttttcttttaaatgtgtaaaatgcttatgatgaaatagtgaaattaagaatttcttaagaaatctgttaaattctgaattttatttatcaaactctggctcaagtttctaatatccttttaaatgtaaatgagaaatatatatacattattccattgaacatgaaggaatgtgtgccatggatttggcccagatatacacaataaaacaaatgttgtaaaaggtataattatttaatagctaatttgtgcaattctgtgaatttgctatatcacaagtagatgagatatctaaattagaattacttcattttttatatcatgtaagaattgagtatgaaaatcctaggtcagagaaattaaaaacaaaacataaagtgaccagcttgtaaattttactcctctttgtgtggggttcagtctagtatccccaaagtccaatgtattacattactgcaaaaataagtatggtgttgtcataaaaggctgtgcagtaataaatggctacgttagcatgcttatcgtttgtacttccccagagaccctaccactgaaaccctcaggtgacctcatcaacaggcaggtggcagttgatcaattctagacaaagttattgggagaataatttcaattacaagaattttgctgcctatagtgtagacagaagagagcacaggtcatccatctttctgaatttgcctgccaagtagtatttattttttgctcttataaagaatagggaaagatgtattactgggaaactccaaaaggactctggagctggaaattctcatcatgtctagcacttggatcccagtcagaaaagtgtaggtgcaagagaagaggctagtgctcccttatatatcaggacattctggagttctttttaaaatataaattccgcagtcagttctgctcatatagcagcttcattagcagcttaacttagcaagagactagcaacaaaaacaggagctaatgtctagaatttggaggagaagagggcttaatacaaagttacataccagcctaactacttcgtatctgttgtatctcagtgaactttcctatagatacaggaaagttgcctgtgttaggaataaaacagatatgagtccccctcacccaatcccatatctagatttccaggaaaattagaattttaaatgccagttgcaaattagaattagaaatttaaatgccggttgcaaaaatcgtctttttcttaggataaaactactctccttatgacctcatggtctttcgtcttatatttatggtgctaatatgtgtgtgtcacttattatgaaatgcttttaacactttctggaaaaagtaggtatataattaataaatcaccgttttactagacttaccatcgtgaggttttgaatccattttcagcccagtttgtagattcaattgtcagctgtagaatgagacctatataaacttaatggaggaggtttcactgttaggaagctaaaaaaaattgttcttttgtatatctataccagcacactgtccgtgaagaaacgatgatggtgatgactgaagacatgcctttggaaatttcttatgtgccttctacttatttgactgaaatcactcatgtctcacaagccctattagaagtggaacaacttctcaatgctcctgacctctgtgctaaggactttgaagatctctttaagcaagaggagtctctgaaggtaaaaccaaagcactttcattcgtattttacaaggtgatcatactgatcattcatagtgccagaacaattgacttaaattgtatgcatcatgatggcattttgactttcacatggaattcttaaaaatacttgatagtgtggttggcttcagaaatctagggtagaaagacataagttagaaaatgtattttacaatatttagctttgagagacatcctaaaatgaagaaatgcacaaaaatgatcatttttacatgcagtagggacagaaaggaaccaccagtaaataaactttgatggaagaacagtttattcctagttaatggatgacttctgtttcattttccaaaaagggaaattagatttttcatttatatgtaatgtatattgtttttgttttatattttttatgtatacatattcaatttcaaattaatgtcaatacctgtgctataacatatggaataaaattgaatagaaatcaataaaatattttctttataactgccagttaaaggctaccaacaaaatccagctgttttcaaaccaccaacagcaagttactaaattctcaagtaaggcaaataatgatgatgaaataggctatgaatttcagaaggcagtgtctgaagataaatgaatgtaggatcaagaaaatgcacataataatgtgtctccagataattttcatgatcgtacattttacactcaaaatgaaatattatagtatacccagagcttggtattttcaaatgcaaacagtatgtgattataggcaaaagatgggtttgctatcagcagcacatattagctaaagtattttatactcaaatggtttcctggaagctcattctatatcacacatttgcctgtatgaatatacaaatggataaagctatttgtttgttttggaaatcggtgttgcagtatcttcagtgacttgactttaatatcttaacattatatcaaataagctataaaattacacagtaaaataagagcttcacagatctctggaactattccatccatgtcagtgtggcactgtttcttattctgtttgaagtaaaagtcaaatcacttattggtacaatgaagaaaagaaacctaatcagttaataaaataaagctgacatgccagaattcctgtcattatttctattaactaagttctcatggcagcatagtttgtaagtgcatcattgtcattcaataagtaaattattgccaatgagctaatatccattccttcccaggttcatggacatttggttcaggagagtagtgaccctgatcttattaagttgcccattgaataactctgtctccatacctcttagcctggcatactcagaatgttagacccttggctacactcacagtgaatcatttgttcatcctgatctatttaatattattatagctgatgtcaatcgtaatagtattgattactgcggtttataatatggtattattgtagatttaatttagctaaatggttgaatccccataagatacagttgtgggcatgattccttctgtctcccaacaaatctccagcaggtgaatgggcttcctaccttcattgacttttttgaagggggatagttttgagctcagtcttttcagtgaatatgtatttcctgttaaaggcattcatcattgtcattatccagtagtaaaaatggaaaagcagtgcataaattgtacagctgctggttgggaaggtttgaaattgtggttgattttattcctgacagatatgcatgaatcaaattacagaactatagtaagtattgctgtgctttaacatacatcttttttgaaagtgcagtacaacacaaataatatgtaatatgttaaaagaattactttctaaacaaaatacaactaaaatagcacgtatggtttcaatagatgtattgaattggaaagctacctaatcatgttgacagagactatgcagataaacacaaacatatatatatacgtatatatatatacatatgtggaaatctgcatttaatagcaaaaacactagctaaggcagagctagagaagaatgagaaacatacacataagtaatattttctttcttacttcagagccaatattaacagttaattgattgtgattgcttatatgtacaaagttaataatactcataacagacaagagtacataattttagaagaattgcaattttttggaagtttagagcaatattaacttgcatttcatttttaagaaaaaatcattttcatgataaaattttccaaaatataattactgtgttaaaccgtcaaatcctgccttaaagtatctcatatgaaagcatgaacacagaatttcttagcatcgtaagttttaaattaccaaaaggttttctctggagagagttaaatatttgaaagcttatcctaaaagcagaaatgatccacttaaaagacttaactgaaaggatttatcatcatgtgtccatatgcctaattttactgaaagcatcagttttattggaggatgaaacactcttgggatgtcacccatatcatttcctgactcagcatgccttgtactctgactggtagctgccagatccaagtgtctctgactgtttgccttagggctctctctagtaatcaaagctcatgagtgtcaggtagttaaagttctgcatcccccgtgttccccagcaaacctcaaccaataacaaataacttttggtggataaataccactactcactcattcttcagttagggtaactctgaagcatgatttatgctctgacccaaaattctgttccaggattaagaccccatcgcacacagtaaaaacctgcctcataggatacatttcacttgctccctgtcctaccttacacacactttactagcacctccttggatcattcccaaagacatcccttgtcttcgaatctgcttataggggaactctatctaggacatttttgaaataaataatgacatatttactgtgtagttagcatttacgtagagaaattcttagaaatagttcatgcctttggagtggaattcttcaagtgattctgctgctccctcattcagggaatccttagctgttcaattaggccttggtatcaataaatgtgaatttttaggacaaaaataagaacatagcttataataagaatgacaactatgctttaccttttgcaataatgagaatcaatttacagctaatattattctttatggtagagcagaatgtcttcacctgaagaacatgaacaagacaaggatatctgcccacatcccttcaatattccacattgcactggagtttcaaatcactgaaaggaggaggaaggaagggaggaagtaaggaagaaagagagtgagggaaggagggagggagaattgaagaaaagaaataaaataaggagagaaacaaggaggaaataaatggaaggaaagaaaaaatatcaggcacacatcatttcagttgtctcatcaaaaccaattatagtacagatgccttgtttggaatgaataaaatgtgctatactttgggtaaccaagagggtgatgaaaaacgtggccatatgaagaaagctcacgggtaggagacatggtggtcctaatgtagattttaaataggatcaagaaatagagacaacccttgttcaagttcgagaccacaagggaaagctggtagtgagcttataagccaaagatagtgtgaagccaggtcgttcaagtcctcttgagttcaggttttttgcattgctcttgagaaacaaaaaattgttaggacaagtaaacctaaggaatgtggattcgtatattccaaaaatagttattaagctcttagtatgtaccacacactattctaagtgcttataaaacagtgaaaaagactaacgaatctttgccctcattcagcttttattataacattgggagacagaatagaagcaagcaaacaaagaaaaatgataagtaaatattgcgtattactaggtgatacgtattttgggaaaaaaaaaaaaaccagaatctgttaaggggatataggaccactacaggggtagacgtaggtataattgaaagtggcggaattgccatttcaaatagggtagaaatgacctttgagcaaagattggaagaaggtaagggagtcagccatggagtctgtgtagaggaaatagagtagaggcccaaatgtgggactgagcttatcttaatcaagcaccaacaagaaggccaaagtggctgaagcaaaacaagccagtggaagggtagaaagagatgaggatatgggagttgtgagtgtccagattgtggagggcctttggggccattgtaaagaagattctaaatgagatgagagcaattgtaagtttctgagcagttgagtggcatgatctcaatcatgttttaaaaggatcacactggcttctgggttgagagtagaactgtaggggaccaataatagaatcaacaagagttgaaaaagagatgctggtggcttggacttggtcggtagtgagagaatgtcagattctggaaatattttgaaattagagatagcagatatatttctctggtcatacagaaacttaagcatgtgtctatgaaaacccattctcggccgacttggggctgagttagaactttggtctcgtaaaacctagcagaagatcccttgagagatgtatgatttcttctcatattttagtcttcgattcttcagtcttgccttgaagtagggacaaaagtactggcaacagagatttttaatacactggttaagatctttctcctctggaatctgtttcacagctcttaagcacaaatttaataatcccaattagttaaatgaaggcaaaattatgccatgagcaaagtgactgcttttctattctggtattaggagaattagataatagcaagaggcaccatatgtagaaatccaaacaaaatatctgaaggaaaataaaagaacgattgtttatatgcgtattgtaatacaggggcatattacattgtttatatgcatattgtaatacaggggtatttaataatattggaataagaggacattgcaattactctaaataatcatggatcatataaaatttcaaagcaaaatttgtttgcaaatgctttttgaattcgagttgaattttctaatagtttaatagttctaacagtttaatgcgtggaaaagatgatttttattaatacattgtgactttgtagaaactgatcttttgaactatacataaacatttgcaataatgtgatcagtggtttctcttagaaaaattgagtttttcaacacatttatttggttataaatataatttgtttcttcaacagcttatatgacttgggatttatttgattgatttgctatatataaatgtgtgtattttcaaatattaatcattaactgtagtttaaatcatgcttaaattatttccatagtacattatttttcatttgtattatatgaaaagatttgtactatagagaagagattatagatatttactgcctttcagtcatgcccagctcatatttatatgtgcttcggtacagttttcttttatattttatacaaatctctcttgtaggaaattatccattctttatccccaaccattattttatcaagcctagcagttgtcctaccttgactattatgctgcaatttactcccaactctgctaaaatgtactttaagaacgcactcctactccttccattctcccagcagcactgttttcataatccccatcgtgtaaagtgtagaaagcagaaacttccatattaaaacttacaaatcatgaggctggtagaaattttgaagttgcagttaagttgtggggaggttttccttttattcacaaacggttgaagctgtgcttcgaccagttataatgtcgttttttatgtgtgatatataattactgattcgttatttatgcaaagacaatgcatcatcctatgaagaatattttggtccaaatacgtagctgtgtttagaaagtgttttctcacatggggacaataaaccatgaagaaaaaattaaaaggtcaccttaccatagagccaccaaaaataactttttaactttttttggaagctccgtaaaacctagttaataagtactttaatgccttttgattgaacacagttcccaattcgatatgtcattaatgtagtgcctggtagctggatgggatgtgaagagtgtaagaattagatttatatagggtgttgcctttatctgtcagataaagacaaattccagagagtgaaaatgaactggagtttgagtctttggttctcttatttctctttttccattttaagatagatctactccccaacggccgctgtcacaacagttactaatgggtttttctaatccttttttcttagaaatgaaagttatgtgctcctctgttaaccaagttacaaagtgtctcaaggcatttctgatacctaaaactgcttaaagctattattttcaccttcccaaaatatgacgacaatagtgcctagagttttataagtctataaacactatacatgcatttaagtatatgtataacccatgtaactgcagtgctacatttttcaagaaggtgatacatacacacagccaccaggaagaaaaattagtatcttgtttgttgtttttttcctccaccactgtatctagaactcctagaacagcacctagcacttaaaggtactgaatgtacatctgttgaattagtgagtgatggtctgatacatgtaggtgtggactctgagatagaagaagacagggcagtgttagtaagcgctggtactaaaagagaaaaccaaatttacttctttttatattgtatcctaactcactgagttaaatcatctagacatgtgcattctacaaatctatatgcatataagcatgaagaaattgttctaggtttgtatatactgaatctaaaacaatcatttatgaaaatgtgtgacagggaacccacatataattaaaacattactaacatttttccacatcagtgagctttcattatgtggttatgataagcagtagagtagagagtttagcaaagtactgtattggaacctgaaaagcttagaaagatttaacctgattgttgatagttgtacccttgggcaagtaacataagatatttaggcctgttttttaacgttgaaattaaatcagtgataataactgcccctgcctactcaactgtactcttgtgaagatacagtgaaatcatgtacgactgtgtaggaaaattcctgttaaaatgtataattatataaatttcaagatttgtaaaatgcatattgcttcatcaaacatcccaaattctaagaaagttataaatttccacgtaaagtatcctaaaaacaaattacctttaagaatgtgttaaacattataaaattgcatatttatatcttaaaaaactgtaaataaaatgttaaccacataaaatatacgtaaagttatttccagatgtggcaaatattctaaagctaaaaaaactttaaaataagagaatacatacaagctaagccacgtttgcttttgacaaaatcttccttagaggatcttacaaacttttgatcatattcttctattgtacagaatgttccttgacttgtgatggggttatatccagataaacccattgtaagttgagaattttgtatgcggaaatgcattcaatacacttaacccaccaaatatcatggtttagcctagcttaccttaaacatgctctgaacacctatgttaacctacagttgcgcaaagtcatagaacacaagacctattttatagtaaagtgttgaatatctcattcaatttagtgaatactatactgaagtatggtttcgaatgaatgtatatcactttctcaccaccctaaagttgaaaaatcactaagtagaaacattataagacgggggccatgtgtatttccgaggctagttgttacttattcaggagtaatttttttattcttctatttatttaaggtataaaacaaataactcactttattgtatatttatcttgaggtgcagaaatgcaactctaaattattccaagattctgtgtaccataacttttaccaagaagaggatgctgttttctagcttggttttaattgttgttttattttgggctttagtttctttatgaaatgtgttgatttattttttccatttctagttcagtaacttaaaacccattgttctaattgtgagttcagaaccatgacaaaaattattgaaaaatattgaaactctaagcaaagaatgatttaatcagtagtgtttttttctcttttttgctttggagtcttgaaatttgcttttgttgtttattttttgttgtctttcctttgccatttaaaaaagttagtttgtatttattttctcctggttaaatttgtaaccatgaacatattaaaattataatgctattccattgaaccttatgaattgtcaagtctttcaaaaggtttaaatattggcaatatcttatagtttaatacaatgacttgtacccaagtctgcttatttctgaatattaatatatatcattaaacatcctgatggaaaaaaaacaagaactttctgttgtaaatcacgtatgattaacagacaccaattcccaaatttaatttgccaaaccacaggcaaaaattaaatagtgttatcagtaaggaaatctatggagcttccaaaaaggtaaacattgagtagagtgttagcttcctgctcccatatcatgccttttgtttatttcttttctttcttttttttttttttttagatgtatgcatttgggtacagaacaattgtatgaaagagcgattttgcttttctgtcccctgtgtaaaacaatatgatggaaagcacatttccccaacatcagaagtattagttatatataaaacgggcataatattaccaaatatgttttctgttttaccaaaatagtttactgtcatcaatattaatttttgcaggtttgattatattttatcatgtatggtagctacctatgaagttgcttaatcatttatactaaattttcatttatcaaaataataagatgctcatgattgcatatgtaaatagaattaaaaagtataacatgaattttaaaaaagcatattccattcattggtgatcatcagtttttgaggttttcttggattgttgtattgctttggaatttttcctccataaaacctacctggccctcctctgctgagtcacacaacactaaagcgtatcctgactctaagaaatttgggatcatagaatgccatatattttgaactaagagaaaagtacttacttctataaaaccccctttgccatgcatgtgagtcaatttttctatttggattttctgtaaaatgatttaggcgatgtgtacaacttaacacaaaatgtacgtatcataaaaggactggtaaaattgttttcaatttacttagtgctgatggactagaatcattttatctgagaaacacttggatcagtaaagtgcagggttttttttgttgttctttttgttcttgttgatgctctgtggcatctggagaaatgggcaggtgtaattctgaataaaggacttttttcttagatatctaatgtgctgtgaggaaaccataaggaaactcagccaggaaatgcatgtggacttctattccactgttcaacagctaatgtcttgtaaaagtaaagtagaataaacaaggaattacctgaatagctcacgtctgaccatacctgaatatctatctacaatggttgaacagagtaacaaatcttagaggttcaatgattgaattcaaattggattttcataagcaagttcaactcaactttttacttcaagtcaacagatatttattaatgctacaagtgctatgcttaacattctaaaagataagaaagaaatattaaggaataatccttgtactctggtagttgataacattattgaatatacatattatagttatacaaacaagttagagagtaataaagacattaaggacatcatccaagcaaaaatatataagacatgagtgtaactgaaatcatgaaaagaagaaagcagcacaaaaagcagaaactaggaggaattttatagaggaggaatccttagcttgaggtgtgaatataactggaatctggactaatcttgaatgtaatagctgacagttattatttttgtgccaggacacattctaaacacttagagtaacttgtatggtcatcataacagccctacaaggaaggctgtattattatacccatactcagatggagaaacggaggtcctgagcagttaagtgacttgctcaggtgagatcatttttaaatatcatagttgaagtcccactctggatgttcaagctccagagtttctgctcttaagcactacgctatacagtttcttgatgcagaaaatgttttcaaagttaaagatacaaagtcagtaagggtaaaaaaaaaaaaaattgtatcagaaggatgtgtctgaagaataacaaagagattaatccttcactttgttattcactttgattatcctttcaagtgtctctgctggcaaagcactaggaaatcaagttggataaaaactgtgaatccagttttttcttttttttcctggaaaaaaagatgggctaaaagatgggcttgaaagtgtccaaaaagctatatgtcatcatggatggattttggtcagggataatccttaaaatggcaggataaattggacacaaggaaaaataaagagataaaacaataagtaaggagatatttgtgttcagcatagctggaccgatttataaaccatacccttgattcagtagctgtaccaggactctcattattaaagttcactcaggagatgcccaacatcctagatcacccattttcctgtgttagtgcaaaatgtggactggatttcccgatacatatttctatctagttaaataaatactctgattggttaaggaaaggttttctggaaggtgtatataatcccaccatggcaacagaaccaagagtctctgactgtctaccaacctgtagacttgaattttttccctgtactttcttctagcttcttcgatttctgttatccccaaaacaccttgatgtagccttaagcagaatcaaccatcaaagggctaactccctcctcctgctgggtgccttctctgttgggccccagcagcagtgaatctatgctcccaacttgacatttttcttatcccctttcccacctcccctaaataaaattcctttgtgtcaaagtttgatttaagtgatagaaatggctaagattgtctacagggttgggtttggaagaaaagaggtctggaaagggaatatagcaaaacatcagtattttctgagcaagtttggaagagattaaaaattacccctagtgactctcaaatttatatctctagtcaagattcctctcctgaatcatgacatatatatatatgccttttatatattcacttagaagtataataaacatcttaaatttagcatgttaaaatcttacaccctaaccttatcctcctgcagttttctacactatagttaatggcaactccattattccacttgtctgtgccaaaattcttcatgttatccttaaggcctttctctaccaacacacatgtaattggccaccaaatcctaaggattctgcctttacaatgtatccggaattcaaccctgcctccactctgatccaaagcaccatcatctccagcatggatgattgcagttgtctattaacaagtttccccctcattgccttctcccctgtagactctactgtcaatatactagccagagatacctatttaaatggaaagtcagattatatccccctttctgcttctgttcaaaacccccaatgctccccatccccctcaaagtaaacagggaagtccttatgttcataagtaccttcatgggttacccaccccattctctgatatttctctggtagtcgctagctcatacactccagccataatcacttcctccatgttccttggccactcctccaggcacattccagtgtcagggcccttatacttgctttacctgtctggaatattattctcatgatttttctttcaatggttaatttctgcatttccttcagatctttacttaaaaactgccttcctggtaaggtcttccccgacccctcttacctaaaattctgacccccactttatccttcatttcttccttccctgctttagttttgctcctcagcacttaaccactatctaactgagtatatagtttagtcatttctctatttgtttactttattctcctgtagaaggtgagattccagagagcggggcttttgctttctggatcactagtatatacccaagatataatatatgactgtctcaggctgggcgcggtggctcacgcctgtaatcccagcactttgggaggccaaggcgggtgaccacagggtcaggagttcaataccagcctggccaacgtaatggaacccgatctctactaaaaatacaaaaaattagccgggcatggtggcgggcgcctgtaatcccagctactcgggaggctgaggcaggagaattgcttgaacctgggaggtggaggttgcagtgaacagagattgcgccactgcattccagcctgggtgacagagtgagactctgtctccaaaataaataaataaataataaataaataaataaataaataaataaataaataaaatatgactgtctcatggtaggttttttcaacaaatatttcttgagttaatgaatgaatacagcgatgtagctgtcagacacagagagagaaacctagaagatagtattactagttaaaactagtgtggctaggtctgtatgatgaaaactgtgcctaactgtactgaatcctgccaaggagggaaagatgaaatggggaagctattactaagtgagtgaataggaatttccttcaggaaataaatatggttaaaaatgtgaattataagtgcttccagctgtctgctaatgttagtccttcagagaaatgaaaactgagaaaccattagaaagcaattttatcacttcttttaaaaaataaagttcaatatatttcaaaccagaatatcatcgaaatactgaagtcattttcaggggaaaatgccctgaaacaacaatttcatattatcttatattttaacttatgcttttatacatttgaaattttatttcatttgaagacttttttctaattgaaatttttgactgagagaacactcacaacttctgatgtaaaattttattactgaggaaaaactgttaaacagaagacaaattagccaattaatgtttgtatatacatcccacagtggacatattatttaaaatcttggaaagagttgtagatttgtgaaggtatatgtgagcttatttctaggtatgaaataagggagcaaagacacttgtaaattatagacatccttatttagtaattggatgttgaagatgaagaaatggctgaattgaatgaccacagagacgggacagaggaagtgatgtttgtttgtttgtttaattgtttattgagacagagtttcactcttgttgcccaggctggagtgcggtggcacagtctcggctcactgcaacctccgcttcctggggtcaagtgattctcctaccttagcctcccaagtagctgggattacaggcgcccaccgccacacctggtgaatgtttgtatttttagtagagacagggtttcacatgttggtcaggctggtctcgaactcctgtcctaaagtgatccacctacctcggcctcccaaagtgctgggattacaggcgtgagccaccgcgcccggctgctattttaaataatagaactttggcacttttcacagtattcgggaagcaacgagctttgctataggtacaaaaatatatttaaaacttcagtaaattattttaagtttactttcatcaaaagtgattaacagtaagttcaatttgtcagatattactctcccctactctagttctcttcaggttctgcaatatctactttgacatttatacacataagtttaccatttagatggtaaaggcaggctctgcaatgaaaatctttgacagcaagggagtagttgtcactttacattaaatggaagaaaaactaaacagtagaagtctatcccttatgataaagaatggagcatagttaagggttgcttcatacctttatcttaaactgattagttggcaaataggtcccttgtttgtttcctagataaattttctgtattctctggcttctccttttatcctgttaaagacacatactccacaacacttgaataaacaaagcatttttatgttcaaattatttctgtatgtgtctcctttaaaaaccaattatcttcttaagggagagactcacattttaaagtctttattttcatatctcacatttgaggctgatattatgtctgtattatcaataaacacttatttaaacaataagcttttcaaacagataaatgaattgaagccacatggcttatagatttctgcttttccttactttaggtatctggatttcatctgccggttgtaaaagttactgtgctatctaatttttctctattcacagtgcataatcagggtcttctttaacttattggagactgtgaatcagagatgcaaatatcctattttaaaatattaaggactcgagttgtataaattcgtgtacagatgcctttcagaaattaaaattccatttgtatgtatatttagaatttccttttgcagaaagagtggccaaaaataaacatcttacagaatttcagcggaatagtgaagtggtcaattcataggggcatgtcaaaattaagaagggatttgactaaaaagttggtactttatcattttgacatcatattttcagataagataaggaactattcagggagagaaatagaaatgctatattctatagtgattctagggatgtttatatcgccatagcaactacaagggactatggcttcctttttagagggtcagaaactataaagatcacttatttctagacaaactaaaatagtaaaatactatcagagatctcatctctgactttaaactatggaaagtgctacagcattttctttggtgcacataccatttttctgtgtgcagtgccttgaggacacgaatatgtgcagggactttaaaaaggatgtatttcctggactccagccaattttgacagcattctctgagaatgcaccaaggagctattatctagatatccagggagtgtgacatcccctgccccagtttttgctttttgcttttctcctttaagatagaaagttttcccgcgttagtaacatgctgtacagcattgctaaaaccgttcataacttgatgctgagcaatgctacagcattccaaagaattggtagctccccagagactcagattaaaatcaggaagctttgcaagctcaaatcctcagagagtatacatacacacacatacgcacaaacacacgcataccatatcaaagccataactggataacttttatatgctgatggggaagatcctttatctcttcccttgaatgtttttctccatgggtgcttacagctatgcatttaaagggtttgggcctgctatgtactaacaaatgtgattggttgcccaatgtgaatttaagtaatcagcctttcattcagctggagtcttggtatcaggtggaggacttggcagagttatgtatctttgccattggactggcagccaagcaagaatgatggagacagtgacttaaaagaattcagagttgaatcaagtacttgtgaaatcaggctgcccaggtcaggcaagttaacagaagcagccaagaagatatgttggtgcacgtttctggtacctgacctaatcaggctagcggagtagccctaaacattccacccaagactccaggcttggagccatcagaagatggtagtaaaattctaccaggtaaataaaagtaaagaaataatactagagatacgcttgagttcaatggcttttagggcattaataacaggtattacatccattgtatctcttttattataatttcaagtgtattttagattcaggaatacatgtgcaggtttgttacatggatatattgtttgatgctgagatttgggatatgaatgaccccatcacccaggcagtgagcatagtatccaacagtttctgttttattatgagttttgtttttatcaatatgaaacttttcttcaataagcaagcctctgatgtcaaatacagcatactgcaatgtcgtacaaagctattttctattttatagtgaaagatgatgacagcaaaagacagtctggtctgcctacatttatgttttccacttccaacatgctgttgttgctctcgataagatcaccaatgacctcctaaattgcccgagctgacttttccctcctggtcctggctgcatctgacttgttgacaactccctccctccttctggttctcttcctgggtctgatgactattattctttagggatactcatctccttcctctgcccatgctttccacataggttcatctttatgctacctttcttctcactcttttcaccctaaacacctttcctgagcaatctgaccatccctagtcttattcaacatcacacacattccaatgactatcaattctctatgtgaaattgctaaaagacagttttaacctgcattcctccagataagtaaattctcagattgtttctgtgttggcttgttctttcttttgtatggtaatacctgacctgtcagataagtactttttccacagagttaaattgaggtgcgaaacaaaagaaataatgaaagctttccatcacaaggtgtacatagactggaagagaatgccttgaaattttattttaaaaacaccttctttctctgaaattcactcacatcacccataaccattgtatcttatcctgttgctgagctgataaataagacacgagaacacagttgctttttataaggttcccattgtaagcattgacttttaccttttacaactgacattatctgtagtctcacctgcctcttcagcttagttcttgctcaaggcaagtcctcgtggaccacaaacgtgaaatcttagaataaggcagaaaatcctctaagttttattgttaacttctttcctgtttccctctctgattgtgaagttttcttcagagcccgtcatctggaaagctgtacgatcagcagcagtcactccctatctaacacagtctccaacttacaaatgattaaaatgcttcccaattttgactgaaaataggcaagaatattccctttgttttgggaggctgaggcgggtggatcacgaggtcaggagatcgagaccatcctggctaacacggtgaaaccccgtctctactaaagatacaaaaaattagccaggcgtggtggtgggcgcctatagtcccagctactcgggaggaggctgaggcaagagaatggtgtaagtaaacccgggaggcggagcttgcagtgagcctagatcagaccactgcactccagcctgggtgacagagctagactccatctcaaaaaaaaaaaaaaaagaatattccctttgttgatatttgttaaaatttatatttatctagtcaggaaacataagatctctggatgagagaatacatcattaattactcaaaagcatctcagggcaagatgtttatctgtgagtgcaggggttgtagtacaggagagaaatcccagaattgtggatcttggagattatatagagcacctgatgtatcaggaggagagaaagtgagagagacagacatacaggaagacagagactttgctctgggctataaaccaatgatctaggtctattatttttggaatataagttgaaatgtaatcaaagggctcttggagataaaagtttttaaatctctccagagcaatgcactaaactccaaggtacgcttgccattcagtcaccctttaagacagttactacaactctttgctcagaaagcctagtccatgtatccaaatgtgaaaatatgtatggctcagcaatccctgccatcttactcctcttctcaaaatctgatttcaactgcctctggaacatctacagtttgatgcctcaaaggcttttcagaatgaccatgtccaaaattgaactgatcacttatgcacacatacacaagcatgtaaccatggaacctcttcatctgtctgaaatcctgttacccaatgacaccacaaatcatgtggatgcccaggccagatacctaagactcattcaagttcttcctcttcttcacccaacacacagtcactgaattctgctgagctgttttcctaaacttccttcccacttcagctcaaatgtgaatagcaactagatacttgattcaattaatgaacttttgttaagactgtaggtgtgttaatggtattatatatgtactttccgaaaaaagttctcatgagagaatatttcagcaagagaaaaatgctgaagtatttatggagaaaataatatatcagtttgtttcagaataatctagttgaagaggtgagtgggtggattgtccatggagtcataacagttggcactggattatagggttatgggagctatttgtattattttcctactttcaaatatatttgaaatcttacataatgataactttttaaaaatcatagttccccattagctactgaagtacaggcagaattttctgttgagattcaaagcacattattgaacatcctcagcctctgtttcatgccccatcttcccctaagcttctatgttactgaaaaggcagccaaatatgactgcgcttgttacctagctttgcgtgtgtgttacctactagctctaatgttcttcccacttctactactcagatatgtctactgcaatttgcaccttcttcgtgaattctttcctgagcctatgaccaaatatatgatacatgttttctctaacttctagaaaatgtttggtaccacttggaacactcatttcttccttcttctcatccagctaaggcttctatacttggatttttttcttcaattcttcaaaccatatcctttcttactactacaataaaacctacttaaaacttcttaaaggcaaactaaactgtgtttcacccacctttgtttctgctatattgctccttacacatgggaagaactcaataaattttgctcagtggaccttatgtataatttagatgatcaaaataacaaaattcgtactaggaagaatagccagaatgtagtttttagcaaatttattgagaataaatatgtttagatttttctttcttcccgtataacccatttgtggtttgtgatttttccgttaaatagaatataaacaaaacattatggattaaatttatgggaccatctattcatttattcaacaaaaaagcttttgccatctatcatgtgccaagcacaggtttgagctttggaagcccaacagataacaacatccctgtagtcatagatttcaaattagtggtatataccggctacttgatatatattttaatgttagtaataagtactataaagaaaagggaagagtaatgccaggaataaagagtgattgctggtgctatttaaaatagagtagtagagaaggcccctttaacgtgagaaagaagtaagggaaccactgatagaaatgtgggttaggaaaactatttttggcaggtagaacagcaagggcagaaatcttgaagcaagaatgtagttgttatactcaagtaatgcaataaacctaatgagggtgaagtgttgtggactatgaagagactgggaagagatgagcttggaatggtaggtagtatacaaccaagtcatgtagagatttataggtcatagtgaagattatgcttttttaaaaaaagtaaaagcaagtttattaagaaagtaaaggaataaagaatggccactccgtaggcagtgcagtggcatgggctgcttgactcaggatacttgtagttatttcttgattatatgctaaacaaggggtggattattcatgagttttctgggaaaaggagtcagcaattcctagaactgagggtttctcccattttagaccatattgggtaacttcttgacattgccatgcatttgtaacctgtcatggcactgctaggagtgtcttttagcctgctaatgcattataattagtgtataatgagcagtgagaaggaccagaggtcacttttttcaccagcttggttttggtgggttttgactagcttatttacagcaacctgctttatcagcaaggtctttgtgacccgtatcttgttctggcctcttatctcatcctgtgactaagaatgcccaacctcctgggaatgcagcccagtaggtctcagccttattttacccagcccctattcaagatggagttgttctagttcgaacgcctctgacatatttcccctctttcttttacaagggaacccttaatcctaagggtagtagagttacccttaggattaagtagtagaagggtaatacatcttctgtaacttcttcaggctgaatatgggtgatgatatttctgcctaactattagggtctcttgtattcagggtagagaggagctcagtcagcaagcatcagcttggtgagggccattcataactgataaatggtgatatctggaagattagtaagttttcaatctaagaaaacattgagtaagcttattctgcattcctatacaaaaagtaaaacagcaaatatattccacaacagtaaaacacaataagtaaaattatcccaagtaaactaaattagaaggctttccgtgaactgggcagctgttggaaccaaagtgatgtggggctgctagctgattccaatacatgcccagaattagaatactgatccaggtttttatattacccatccttcttgtttcttctgaggtgcagtcagagatcactggcaggttcacaggaataagcaggatcagtctatattgcaggaaaaaactcaaaaacagctgacgagactaataacaggtgtaccatagttcttaaaacataatttttttctctctccagtctcccatttttactaaagatggatcatcataggactgatttgctttattatacttggcctgattatttgtataaagtgttgcaagaataattatttttcatgtaggcttttgaaattggctgtgattgaactctgtgatgaagagccaccagaagattttgagcagaggagtgatatgatcccaattatgttttaaaagaatcttttcggctcttgtgtggagaattatccagtaggggggaaagagcggaagcaagaggaccatttagataggtagttctataacccagatgagagacaataatagcttctatcagatctgtagcaagaaaggtagtgagaagcagtcaaattctgcatatgtcctgaaagtcaagccaaaacatttgcccaataatttgaatactggagactgaaaaaattaaggatggctccaaagttgtcaatctgagtaattgttaattgaattactataattcaattgaaatcagtaattgccatttactgaaatgagggaatctatgggatgagaaggattaggaaatgcagttcagaattttgtttgcgtcatattaagtttgaaagtctcgtgagacctccaagtgttgagaaattagcatttgttagactggagttcggaggagatgtccgggcttgagatacacatttgggtgtcattgtcttatataagatatttaaaattatgagaacaaatgggatggattatggacagagaagaaaagaagtgcaaatactgagtcagagcactctaatattaagatcaggatgagaaggatccagcaaaggaaagcagaagaggtcaggatacagaagccaaatgaaggcagttttaagatgtagggagcgatccactctctcaggatgaggtctgtgatttacctattgaatttgaacatgtcaaagtcactggacttcatggttattaactttaaaaagtcaataattaagaattgcaacaccatttgctacctttgggatttgtatatatatatatatttttctctttctatagacagctaattcatttttttactgttttaaaatttttatattacagaatataaaagatagtctacaacaaagctcaggtcggattgacattattcatagcaagaagacagcagcattgcaaagtgcaacgcctgtggaaagggtgaagctacaggaagctctctcccagcttgatttccaatgggaaaaagttaacaaaatgtacaaggaccgacaagggtaggtaacacatatatttttcttgatacttgcagaaatgatttgttttcagggaactgtagaatttatttcagtaccctccatggaaaaaagacagggaaaaagaagtatcactctcattgaaaaatggtaagtaaaatgagaacaaataatgatgaacaattcagacaaatgagctgaactgtagaaattattcagtattaaatttagcgttatgttgaagcattatatcttctaaaatttcaggtaatcgtaaatcagattggggcattgaggtgctataaacagttgttcgatataacatatttatctttagtcaaatctgtatctacaaatttataggagtttgatacttagattaacatgtttaaaatactacctatcaataaaaaaattgattttcatttatttatattttggagggtgacactttacactttgcattaccctcccccacatttttttttgccatggggaatttgttaagttgatttaaaatcatgtttctttttatcttaattgaaatatttagctgttgacttaattggggggtggcagaaattcaattacattatttagcttcacatcacaagaagtggattactctttcttttacatttttagattaaaagtaataaagttctctaacagcttaaagtgattcatttcagaagtctttatcctcaaggtaggcttcttaattattctcagaggaaatcaaatcattcgtctaataattatagggaacctccatggtatctcttacatctgtccatttctaaccatctttactcctattttagttcttggtttactacatcaggcacctaaagagagatttctagcattaatctcagttgtctcaagtgattatctccactttgttctcaacgatctttcagtggccgtcatttttctaaagtgtaagagctttggtactataatctcattcccttgagaatgaaaccctgactccttaattgtgcaaaattatctggtcagcctcactgcttatttcttcgtgcctgccctatagcaagcccctccaattatgttctagcgatattaaatcaatttgcagatgcccaagtgttttgtactccctctgacctgcctgttcttcaggtctcacttcagatgttgtctttttctagaaatcctaaaactattagtcgctcctaacatctggaaacttggatattgtttcatcatttaatgtaatttaatatcaataaatcatttatgcatttgtaaattttccagacttggtggctaccgtgtagaatatatgatctgatgtgcctgctcctaaaacctaacacatagtaatcaatttgtttacttttctgcctcccacacaagctccttatagaaaagggctatgttttatttgtgttatatgctcaggactgatatagtgctgagcacaaagtgggtgttcaatgtgtctggactcaagcctcctctccgaaacctgagaatatttcccctttggatagtctaccagatttatctcactgcaccttccagggcaggtgcggtggctcatgtctgtaatcccagcactttgggagtccaaggcgggcacatcatttgaggtcaggagtccgagaccagcctggccaacatggtgaaaccttgtctccattaaaaatacaaaaatgacctgtgcgtggtggcatgcgcttgtagtcccagctactcgggaggctgaggcaggagaatcccttgaacccaggaggcagaggctgcagtgagcccaaatccaccactgcattccagcctgggtgacagagcaaggctccgtctcaaacaaaacaaaacaaaacaaaaaaacagatttatctcaacttccttgaaaatagctggtcccacagtatccaaagccaggcttgataaaggcaaagaaactcagccactctgtgtatatgctacaaatacaaacttaaacttataaaatggtggctcatgcctgtaatccctgtgctttgggaggctgaggcaggagggtcacttgagcccaggaattcaaggctgccacgagccatgattgtgccactgtactacagcctgagtaacagactctctctaaaataaattaacaaaaatatttgaataaacttatatcgccaccatggtgtactttctcccagcatttcacattgagacattatgaggctctgcgggctactccaatgatgtcagtttcattaccatcttttgggatgttcattccactcttgggaagttcttccccctctggtttgtcttcttatagtcagtgttttctccaagcattctaggccacccacaccatcccctaaggaccgttgaggtttcttggatagccagtgattactgtgcttctatatacacctaccagttttgcactaaagtagaaataacgctttctgctttttgaggtttctcctccgctttactcatgagtaatttttggcaaatgatccaggtattcccttctcactgggtcatatggacatttccctttcagtttaccttcaccttagacttaaacagaaacactaacgccattccacagagagggtcgctgaaatctcaccccaactctgaggacttttctggttttgacaaaggatagagtttctctagccccaatagatccaccctgtccttatccagaggttgaaattgtacttccattgacattctataggaattggtcaggagctgttaaatttcctatgacttttagtacaatctcagatacaaactgttttaagtaattgcttataagcacaggctctagagttccaacccgttttggaattctggcctttctgctatctatgtgcccttgagcaagtctcttaaatcttctgctccatacatttctgatgtataaaataggataagaatagtgtctatgtcacagggttgttatgaggattatctgacacaatatatgtggggagcttagtgggttgcttaaacacgataatggctcagttaaggttggcaattttgatgatgaaaatggtgatcttatggttctgatagtcatgatatctgttaattcattcttacatgctttcaaatttccctgagaactacagagagaagaattagactcagtccctgctttgaagagcttcacagtcttggagagaaaaggcacaaccagccagtaaaataagggttgatagactggagctgtacaagagggcaagaacaagatccctggggaatggaatgaagctatcttactaagaatggggaataagtcaaggtctatagaccattcaaggttctgagttacaactaacagaaagtgactctagttactttaggtagaattatataaattactagaaggatatcagatacctcatggaatcaataggaaagcctgagagctaggtttaacaatgggcagaaactataaaggaagagcaggctaggcatccagaatatatctactatcaagctatgaggtaaatctgaattattttgctgtcatgccagagtccattgctttaccaggagcaccattgcactggacattgcttgctatcgtcactgcaaaaaaaaagtatctaaattatttattcttgctgtgtgtcgctcattctacaactagggtctctggcagaagcatctgatagtcagaggatggatatttttttctgtaaaggggcagttagtcgatatttttgtccctgcaggtcatgtagtctctgtcacaactactcaactctgctgttttagggtgaaaaaaaccatgtataatatataaatggatggacatgttgtgtttaaataaaactttatttaccaaggcagatggcaggctggaattgctgatgggccatagattgatgactgctgttacaatacaggtttaggccacagaactaggttcttattgccagagatcagggaaaataaatagctgaatttgttcttcattgtagtggcagtcaacacctcgtgtcctactaagtcccatacaatggtagattcttgaatccttggagagatttagaagctatgcattcctgaatacacaaatgttcagtacagccttcatgtggtgttctcaacaaaaatctgctgagttttttagtaagccaatttgggttaaatcaaaataaatttgagctagtaagaagggctatattggtatttttcttaaatggtacatgtatggtagtattagctatgaccgcaataatgctgtgacacaaatcaccctagaacttgctgactgaaaacaacaggcatttctggctgtttaggttacttgtaccttgactgactcagctgggcttggccgggaagctctgcttcaagatgtgggttagtagagctaggttccatgatgcatgttggattaaggtctgctatatatgtctttgctctggacctaagatgaagggtcagtgacatgttttcatgaccagtcaccaaagtataaacctaaacctcccaagaacactcatggcctctgctcctgtgaagttcactgacatttgattggccaaagcaaattacgttgccaaatctgacatcaatagaatgagaaagtagactcttcctacagtggaaggggggagagatgttaatatttgctgaaccataattcaaattattagagatagttaataatttataacaggattgttttacagctagaaaatgccttagtggttttgccctgcttcattattttataagggagaaaactatatttcaaagatgttatgtgacttgcctaagcacatactaaatagtacatctgcgtatttctcgttcagtcatctctattaaatgtcataaggtaaaacagacattacgctttagatgagaacaggaagatatttaaaaagccagactaatttatgactgctcattcattatctaacatacctgcttccatacattgtctttcagcaaatagaatttcaacatgtatctcaacaagttacacatcatcaaagtattaaaagccttattttcacggacattctgattgttcactaacagtcaacacagtcaacagtaaatccacaagcaccatgaacgtatggatagatatgcctatatgtaagattactagttaactttttgggaaattaatattactgctaaattcagttttcattgattttcgggtgggtaactaactgcttataaaatatacctataggaaacatgtaaaaacaaagaatttacataagatctatctgggattagagaaacaaagctcttttcttctttcaatgaacacttaagaagggcctactaaatgtcagatgttatactctattgtcgttagtttctttctgataccatctttactatcctgtaagccattagtgagtgtttcccacttttagaaaatgacttcccaaagactaagagggtagaacagttcaaatgctatcatcaaaatgaaggcagtttctagactacaaattgctgtacagccataagatggcattattgtgtaacaacaaggtccctgtcaaacatcaagaaagtaatgttttaaaatcagtatttccttcttggaattctacttagtcagatatgttgggttgacttacccacccatataagtagttaaattcaagatggttctgagctttagatatgatgtaaaatagacatgagactaagagtatttatttctatattattacatttctatagcaaaaaaagaaacctctaaaaaaattagagaaagaagtataagggcatttaattaatcaaatgttcttattaataatatttcataaaataaaggaaatgttgaaaaataaaatatgaacacagtgttgtataaagtaagtcagaaataagagaacacttactgtatgaatctattatatgaaactaaaaaattaggcactttggagtttagaggtcagataggagttacctttgtgagttgtgattaacaagggctgaagcaggcttctagggactgggtaatgttttgtttcttgatgtggatgctgcttgcattgatgtgtttcctttagggaagtttatggaaccatacacttgtgatgtgtacacatttctgtgtgaatgctggactgaactaaaatttatacttacattttaaaaataataaatatgtactttaagtacaggagggacataaatcataattgttttaataaagaaggtgtagctttaggaaaagcataccgcattgttctatttttggcatttcaccatggacccctgaacattttataattgcccagtacagcctgtcagataaatatgtgggcactactgctttagagaaagtattttccaaatttatcaccaccattctggaaccacagttccacaggtcattaggatgctgagggtgggacagttggaagctgcttccccagggatttctccattgttcagttctcatagcagtaagcctgcagcattaaagcactcacaggctctggctgccatttgtgctacatgaagaaaaatgagaaaatgaaagaaacgaaaggagagaaaacaggagtagaaaccaaataaatcagattcgaagagaaagtccctaatcgtctctgtattcagacagtagggaatgagcatgcaattctgcaagcccattcctaatgtgagtttctgataagaatttgctatctcagttgtaatctttctactgagacattcaataaataattttctttcatgtcaaggtaaggaaataacctcacattacccatataaggaaagaatagtatactaatcctcacgttatcactatagaattttatcttttaaagtggaagctagagggacagatgcataatctgggagcttttccagaattgtttgttcctaaatgagacattcagctatagcagcattagcagcctcttctatttgtcacaatgccatatgtagttgggaagatacatgataagcacatacaggatgctgacaactcacgaaggattatcattgcagtcttagaattaatctctaccatatttgaagatttttatgcaagactggatcttcattccacaacccaggtataggtatatgtgccaatacaaaatacttactgttggtttctgagcttggtagaattaggaagtaaggggtaaaaaacaagcaagtcctgaacttaagaaagttgttcatatcctattccatggccactgttttactgactggaagaaaggaatcccgtggattcagtcatggggacaatgcagaagaagatacagtagacagacagagaagtacaaatttctatttatgttccacttttcaaaattttttatctttaaatgttatttttaacgtttgtgggtacatagtgtgtatatatatatatatatatatactgtatatatatatatatatactgtatatataaacacacatatataaatatatactatatataaacatatactatatataaatagatttactatgtatatacacacatacatagtgtatatatgtggggtatatatatatgtggggtacatatatatatgtggggtacatatatatatatgtggggtacatatatatatgggttacacatatatatgtgtatatatgtggggtacatatatatatatggggtacatgagatgttttgatataggcatgcaagtatcatggaaaatgggatgttcatcccctcaagcaattattctttgttttacaaacagtaaaattgtatttttttaattgtttaaaaatgtacaattaaattgttttgactatagtcaccctgttgtgctagcaaatagtaggtggtgttcattctttctaactattttttgtaccaagtaaccatttcaacctccccctcaacccccccactacccttcacagcctctggtaaccatccttccaccctctatctccaagtgttcagttgttttgatttttacctgccacaaataaatgagaacgtgtgatgtttgtctttctgtgcctggcttatttcatttaacacaatgacctccagttccatccatgatgttgcaaatgaaaggatctcattctttttatggctgaatagtactctattacgtatatgtatcacattttctttgtccattcatctcttgatggacgctcaggttgcttccaaatcttggctattatgaacagtgcttcaacaaacgtgggagtacagatatctctttgatatactgatttgctttctttgggatatatacccagcagtgggattgctggatcatatggtagccctgtttttagtttctgaggaacctccaaactattctccattttggttgtactaatttacattcctgccaacagtgtacaggagtccccttttcttcacactctctccagcatttgtaattgcctgtcttttggatatgtcgttttaattggggtgagagaatatcccattgtagttttgctttgtatttctgtgatgattagtgatgctgagcatattttgatacacctgtttgccatttgtatgtcttcttttgagaaatgcctattcgaatcttttgtctattttctgatctaattattagactttttcctatagagttgttttaactccttatatattctggttattaatcccttgtgagatgggtaatttgcaaatattttctccctttctgttggttgtctcttcactttattgattgtttcactgcggaggagctttttaacttgatgtgatccatttgtctatttttgcttttgttgcctgtgcttataggatattactcaagatttgttttacccagacagatatcctggagagtttctccaatgtttccttgtagtagtttcttagtttgaggtcttagattttagtcgttaatccattttgatttgcagttctctgatggccagtgatggtgagcattttttcatgtgttttttggctgcataaatgtcttcttttgagaagtgtctgttcatgtccttcacccactttttgatggggttgtttgtttttttcttgtacgtttgtttgagttcattgtagattctggatattagccctttgtcagatgagtaggttgcgaaaattttctcccattttgtaggttgcctgttcactctgcatcaattttgcatcaatattttttgcatcaattttgcatcaatatttatcacatggtagagttcagcagtgcagccatcgggtcccaagcttttctttactgggagagtttactaaggcttcagttgtgttactcgttactggtccgttcaggttttggatttctttatggtttaatcttggtaggttgtatgtgtctaggaatttatccattacctctagatttttcaatttgttggcatatagttgctcatagtagccactaatgagcctttgaatttatctggtattaattgtaatatctcctttctcatttctgattttacttatttgggtcttctcccttttttcttcattagtctggctcaagatttgtcaattttgtttaccttttcaataaaccaacttttcgttttgttgactttttgtatgttttctttattacaaagtcatttatttctgctctgatctttattatttctttcttccactaattttgggttcgatttgctcctgcttgtctaggtctttaagttgcattgttaggtgatttatttgaagtttttttcttttttgatagaagcacctacagctgtaaatttctctcttagtactagttttgctgtatcccataggttttggtatgtggtttttctttcattttttgaagacatttttcaatttccttcttaatttcttcatagacccagtggtcatttagtagcatattgtttaacttccatgtgtttgtatagcttccaaaattcctcattgttgatttctagtctcattccattgtggtcagagaagatgcttgatattatttcattgttactgaatttttaagactgcttttgtgacctactgtgtggtctatctttgataataatctgtgtgctgagaagaagaatgtgtattctacactcattgaattaaatgtcctgtaaatattagatccatttattctatagtgcagattaagtccaatgttactactttggttgagcttctgtctgggagatctgcccaatgttgaaagtggggttgttgaaggctcctgctgttattgtattgaggtctttctctctcctgagctcgaataatatttgctttatatatctgtactccagtgttgtatatatatttgctttatatatatatactccagtgttgagtgcatatataattgttatatcctgttgctgaattgacccttttgtcattatataatgaccttctttgtctcttcttacagtttttgtcctgatatcgatttggtctgatataagtagagctagtccagctatgtttgggtttccattggcatggaatatctttttccatccctttatttccagtctgtgtgtagctttataggtgaagagtgcttcttgaggtcaacacaaaattgggtcttattttttcatccattcagacactgtatctatttttcttttcttttcttctctctcttttttttctatctttctttcttttcttttctttcttgagacagcatctcactctgttgcccaggctggagtgctgtgacaggatctcagttcgctgcaacctccgcctcctgggttcaagagattcttgtgccttagccccccaagaggctgagattacagtcacccacaatcacgcgtggctaatttttgtatttttagtagagttggggtttcatgatgttggccaggctggtctcgaactcctgacctcaagtgatccacctacttcggcctcccaaagtgctaggattacaggcgtgagccaccatgcctggtcgagacactgtatctctcttgattggagagtgttgtccaggagctgagcctagaaatgggtcctcacaacactgtccagtgccctatcctactgtgactaagctggtatccaagatgcaagacagaatcctctttacttttcactctcctctccttaagcaaaagtaaggagtcacttttgttactgtgggctgcactgcttgaggtgggggaggaatggtgcaagcactcccttagccatgccagctggtgtctccctaggtcacatgccaccctagtcctctagctcttagcccaggctatgactagaagttatctaggaattgcagttcgtgtgtcccagactgcctctcaggtttacctgggactccagagcactttggcccacaatggtgaggcttgccaagaaacttgagttctgactgctgggatgggcgattcccttctggctggggctagttcaaatattccctccgtgcacaggcactgactgaggccagcatggcttttttctctactgtgacagcacagcagttagttcaatgtaaagtcccccagtagctgtactgtcccttccaaaagtgcaaagattccctctctgcactgcacgtccagtgctgggtgattgggaaggtgtggtgttggtgattcaagactgtgtctcctgcctttcctcaatgcctcttttagcaagatgaagttaaaaccaggtaccatgattccgtacctggtttttggttctggtgacagtgcttttctgtctgctcatagttgttacaatttgatgtttcagtgagggagattagttatataggcttctattctgacatcttgcaccactccgtctcacttttttgaattgttgaaaccatggtttatggggaaatgttctgttctggtttttaccctcaagatcttctttgaaaatcatgatttactaagtaactagttggatagaattcatttttaagaaaataatgaataagtagttcccttagatatagcaagcaatgttcttataaactgacacaccaaaacacttaccagttcacctaaacactgaaagtatttaaaaatttatttttaacctttaagtttttctccatttgagtatcttgtgcactatacgctctcctacatatgtctacaatctttggtctgatttattttattggttgttgaatgtcagaaaccacctgaattttgcttgtatatataatgcccagtagagtgcacattggtaatcaatacgacttgatgataataatggtaatgaacactataatttgatagcatcaacttggcatgtatgccagaaataaaccatcataaacttcgagaaaaacaagtctcattaatctgtcatttattataatctccctccatcaagcgtagcctctatatactgtcttttttgccatatgtaagtttcttcttgtatatttcagattagagcttgcctcctcccacacactatcttctatttcacactgctctgttcaagtgtttatgtttctgctgaaggctgtataatctaagataatccctagctattgtaaatatcattcactggccagtcattgcattttgcacaccactgagagagtgattgtgagccaaatagaggagattttgtttccacccagcaacccaaaatgaattgtgtgatttgactattgatgccaattacatggaagttttactaccagaggcaaagctttaaactgcaaaagattaaccccatatagttggtgtcatgaggtatttaatgtatattggactatcaaagcgtctccttacaacaaaccaattatcaatgaataatattcttatcttattgtgacttattgaaactctttaaaaaacatgaaccattcagcacactataccgtctaaattagatatctaaactagccttcatttacatttccttgtttagttttaaatataatttcttctgaattcttagttgttaagagcaggtggtgaaagaatttaaagaagaaaatttgttgtatttattaagtgaaagagctttttgaaatgcattaaatagaagtttgtttctgcccatcagcttatcttctgcatattcctatttatagttcaaagcacttaagagttgcagagtgatttgctttttatgatcaccgcttcatccaggatcatttgccttatatcttcaacattttcagattcttataaatcttcacagttcacttagaggttagtttaaaactttcttcagataagaaattgactagatataaaattcacataatctcagagttagccatagatcaatatccccagtctttttctcaaagtaattgaacatttttgtttcccaggatagttgtatacaagcattttcatcctcaccatagatgattcttgttcttcagtatatgaggggactgtatttgcctgcttgttatctaaataaacatttttattattgtcaaaggaaaaagactctaatacagaaagaaattttgtgtccataggactagcctcattttggaggctgatattaatatttgactttattcattgtgtatttcttggttttgtcatttcacaaatttcccttctctaaatatgcattttttctctacctggaatagatgagttttaaaagacattactgtaaaataaaactgtgctaaatgtacttttcccagaaactctctttattttatcaattataatttgctttggctaagtgttacagaagctcaaggtagaaatgacttaaataaaagagaagcctatttctttctcctgaaaaaccctggaagtttgcagccaaggcagatatgttggccccgctcatttctgttttctactgagtgagttatctttacttggtggaatttcatccacatgttgcaagatggagctctcatgacatccacattccaagaaggatgtaagaaggccagaagaagggtcaaagggtgcataccaattgtcttttagggaagtttcgtgggagctgccatgttatatttccacttacgcttcattggccagatgtctgtcacatggccacatctaagctgcaagtggggctgggaaatgtgtttatttcacatgtgctctgctaaaaactgttcagtcatgaaaaaaaaaaaaagaatattggaagagaactaacagtcttcaacatgtatatttaaaaagagcgttatttttcttttacttatttatttttttttgagtgagagtgttgctggggctggtctcaaactccctggatgaagtaatcctcccacctcagccttctgagaagatgggattacagaggcacaccactgcacccggctcctgttttgttttgttttgttttgttttatttaaggagccctaagaagagtgtaaaaagggcaactttgtctttagttaacccttccctttttttttctttcctaattttatgaactctgattcagcccgcatcttactctggcttactaaattctgccaatataagagtagaagttttcatcatttccctaggtacctactcttctgtttctccatattctcaaagtaatttctcattcatcaacttttgtctgacttagatttaagctactgcttaggaaatgtgagaaatggagaatttggttgtcatagcgctcctacttagagggctaatgctttcctaaattttactaaagttggatcctaagttatataagttacctaaatttaattagcaagttttgcttactaattcactgactaaccactataaaacaaggacctaagtttaaagctgatattatgacaatgtactgaaatttcaagacattactttttctggacacgtaggatggaccttgcataagataaaagagcttatttttaggcacacctatgtgccaggcatgggttcagagccttacatatatcatttcattctcaagagaaccttaattttagagacgaataattttgagttttagaataaataattgtcttaagctcacacatgaagtatgtgccagagtctatatcgtgaccccagttatgaattcttttccactacatagcctgcctccatggcatttcacataggatttcttatgctcaaggattatgttcttccttccagatctatagacatcagtagaaacaacacaaatacgtataatgactttttaaagtctcatatacaagaccaaagtactttaaaaagatgtttaaatttttgaaggtgatatctttatgttcgagatcagtagcagaaatggattgtaattcattacaagatgcttagcaaagccaagtggtaaaggattttctgatgtgcttgaggagtcctgacttgctccttagcaaattcctacacaccattcagcattcagtgcaaataccacctcttggaatccttctctgttcttgatcaattattccattgtctggattcatagaactctctgtttacctatttatcttacaggttattatcatgagtttatatgtcttacatagctgtttgcaacatgttaccattcagtggagtactttttcctacagggaagaggctgtactatataccttttgtcacccctaagtggaatgcagtatggtttcatgttagatgttcaatacatgttaatattttattgatgagcccttaaatgtatataataagcttctcactcaaaagctgtaatattctagaatgaataagtttcttgagaaactctttggttaacagaatctccatttccatcatagtgtattcaataaattattaatgcagggtaaatttccttatatttcctttcatttcgctatactaaggtcaaatcatgacttttaggtgtggatacagcaatatataaaataatctaagacctggatatatgtttttctaattagggaattggagatacatgaacagtctctcatagagaaaaatatatccattagtcactaaagtcagtataacattctggtgaaaggtttgcttgcttgcttgtctgcttacttgcttgtttcaccttctattctaggaggatgtttgtcacaattatgaaattctaacgctttaaaaatctgtttaccctatgaaagttgcaaattcttgcctgtaaggcaattttcacaagaattattttcatattagttttagtttatccgtggatagtctcaaattcctcttgaaaatatcagtgttctcaagggaaaactgcccattacaagccacagatgtggttttttgagagatttctgcctgaaatacaagttttaaaatattctttgtagtttcctagtatggctagatacttgtaggaaatgacaatttagatgcacatttgaaaattcttagcctttgagtaatttatatgtttgaataaatttaaactatctttgttcataaaaaggcaaattttgtctgtttgtcttgaaatgcttttttagtttcttcttcagttctttcacttgtctttctgtaatattcaaaattatagcatagtacttgaaaaccaaggatggtccagtctgtgtcctttgttttgaaggaattttggaatcatcagagatataattctggaatttctttgggtaccttccataaaatagtagcatcctgataaggacgtagatgctaacttttatttttatctcattttctttcccctatctctcagtaatgtaggagtgacccaaggtagctgtttattgggccctcaccaaagtcaatcaatattagtcagctacaaccacaataatgctgtgtgacaagcataccccaaaagaacaataagcacttatcctcatattcacaggcctactttgagtaatctctgattcagaatctgactgtaggttgaccaaacatgtctgatctatgtgtctcattctggggctcaagctggaatggcagtagatatttggggcacattcctccatggctgagttctaaagatctcagaagggtaagcagaaacacatgatggttcttaagacccagatttataactagcgttctctcttccatccatagtcaattgtcaaagcaagtcacgtggcatatccaaagatcagggatagagaaatacacttggcagttagtgaacccatttcaagagtgtgggtgtataacactactacaaaacagaactgagacttgcaacttgaaataccacaccattctagtagaattttattacagtattaattaaacatttttgataaaacacagacaactctgttagaaagcccaacttacaatttgttgatcccacttggaaaggtattctgaatccattttttcacaagttttctttctaattcaatgtgttggggtacttttattttacccagaaaagtaatattataaagcataaagttaatgccccctgtaaaaatagaatactgaaacaaactttaagtcacaattttattatttactgacttgagaatctccttgtgcttcagcacacttggtagttggatttccaaatagcatcatgactttccatacccagctgtctgctgctcaaaactaccataagctgactatcacagctcacaggatacccttgaagaagaccatctggtttatgtctcttggcaaaatttgtttaaaaacaagcagctgcatgacaaagtaagaaagagtctctgtctagctgtggtaaataagtagctttgcaatactcataataaagcatttttctaatccaagccaacatcttcaaaaggaaagcattattttcttacaactgaaagaaaaatctacagaattcagtgatgagggaaggactccattaaatttgtttcagcagcttgagatagtgagaaaaacaaaacaaaataaaaacctgtttgtgattagatacagtcttgtaataactagttttaaaagtatttatttagaatctaatacttggatattattttaattctttatattaagagatttacatttcataaaagcttgtcctttgaaccctaatactcatattgtgatggtgagccggaatgagtaaggtcacttactatatagtcggtatataataattcgttgaataactctctctcctcctgttactggcagtgaatccatacgggtcttcagcaaccttaattcatgcctcctcagaagaaagaattcgaccaaggaggcataaggcagaagaagagactgaggcaagtgttagagcaggaatgaaagtttatttaaaaactttagagcagaaatgaaaggaaataaagtacatctggaagggggccaagtgggcgacttgagatattaagtgtcctgtttgaactttgatttatggttttgtattttggcatacttccatggtcttatataccttctccccaattcttcccttggggtagggggctatctgcatgcacagtggtctgctgacacttgggaggggagcatgcacggtgtatttactggagttgtattcaagaggtgttcccttaccagtcaagtgtttccagaggaaggtcgtataccagttacactatgacattttgcctcttagtgcgcacgcgggagcccatttgcccaactcctgcgatcttatcgggaagctgctgatcaccaatttcaggtgtttttatctattgggagactgcctttccctggtattggctgtgaccaattattattttaaagacacagtttaataaccacctgactgaccatcacttgatggttgcctgacattcctggttggggtggcgggggtggggggtctcctaccctgctcatatctgactagctatctactgtaacactactattaggtatgtctgtatcccattacactcactctctattacaaaaaagagtaccttattcatttttcaaaagaatgagtgaattttctgctccagttaagtgcttttccttacctctatgtagagtgtcaaactagccatgcttaaggattgattctggtattaataatataaattcttgcattatgagtgtctcagtttgggttcttacataagcaaatcctgagacaaggatgtgagttcaaatagtttctttgggcagtgattctaggaagctgtggtaggatgttggagttgtgagaaagttaagagaaagcaacctgtaaagagtatgttatcaagccaaacaccactgtgagaactagggcttaattccctggagaaagtctgggaaggcataaaacacttgtctcagagttatcttagacaaggtgcaggagctgaggtgtttatatttcaactcttgttagtcacttttaaagggccgctcagggtgtcagggtattaatttcctcttgcaactacttccaacctgtttttgcatgtggttgtagctactttttctgcgtcaaagatagactttaggctaagacatgcagtttccggctgtaggacatcaaccagagtaccctggagtgtccaggcccaagataatgggtgagctccacctggatctgtggcaatgtgagggaggggcattattaccctagcaagggccactgcacttccctatccagctggtcactcttctgcgtatttgtgttacttttctgactcctgcattcctctggatcctgattcaccatcagcttttgtattctgaggcttgtgtggctgtgtctttctatttcttccttattgacttacttgtttaatcttttgctaatgtatacctttgatattcctatgtactcacctttggttagctctgtgaattattgagtcttgctttacagctttaaaaagatcatagccatggtttgttttttaagtgtgattcataacagttagtgacaaaattagaagtggaaattaaaggtcacgtgcacaatcctacacaagccaatttcttgaacgacataaaatacttgaatttgtcttttactatcaccaatatagaaataatttgggggtatttctcaaagtattgatttaacaaaactttatttttgtgtgaagattttttcaagtctcctggaaattattcaaattattgtctttaaagtcaaaggaaaggttaatattagggttacttttctttggtcacagaattgctggaggcttctatgacttgctttgaagcagctgactttatgcacagttttggttagaaattcactaccaattccaacattttcaaagtcctaaaagaccaaaagtacaattcttgaaatatccctagagaaagcaagaataaattagttttcactagaaatgaagacaaatttttctcattagttcattttgcctcatgatcagaattctttgccacatgaaaatattttggttaataggttgtaacataaagagtaatatgaatagagatctagcccaattagatgacagaaaaagagcaaagcttttgaaatgtataaagaagaaagtttaagagagacatgaacaaggctggatgtagtttaaggttgaagaacacagaaaaatgagataagtgaagttaagtgaaaatccttcccttactgagaagaaagagaactcaaaattatgtgaaggtttttgttttactttgttttgcttcttaataaggaaacaacagtggcaaatctggggcattaggaatggtggaacttctataacagtgatgtttcaaaggtcacaaaggaaattaaattgtagattgggtttaaaagcactggaattacttccagccccattttttcaggattttgtatgtagcaggaaatagatcaccgcatagctaaaggggagaatttaggttttaactggtctcagtgcaaactgcttcatagttcctttgcatttggtggtgtatgtaaaacatgaaaggtataaacatttattatcataactttattattatacaactatttattggctgcataggaccatgtgtcttcttgcaggtataatcaaaaataaaaagacagaaatgtatcttatatgaaggctgccattatcgctcttatcaatggccataaaatcagatttcttacatgtacaacatatgaaaatatattaaatatgaaacgttttccattaaataattctgtaaatgattttcataacatttctgtccatgatgtgtaaatctgtagatcaaatactgcaagtgtacagaacttaaaatgctttggtcaaaaaaattctcttattaatatgacaatggcgttcaaaagtaaaaaggtaaaaatacagtttagcattaataagtaaactcagaaagtaaaatatattgatcatacagtctgtattagtctgttctcatgctgctctaaagaactgcccaagactgaataatttataaaggacagaggtttaattgactcacagttccacatggctggggaggcctcagggaaaacttacaaccatgccagaaggggaagcaatcacatccttcttcatatggtggcagaaaggagaagtgctgagcaaagggggaaaagccccttataaaaccattggatctcatgagaactcactatcacaagaacagcaccatggggataaccgcccctgtaattcaattacctccaactgggtccctcacatgacacatggggattacaggaactacaattcagaatgagatttgggtggggacatagccaaaccatatcatttcatccctggcccctcccaaatggcacgtcttcacatttcaaaacacaataatgccttcccaacagtcactcaaagtcttaactcactctagcattaacccaggagtccaagtccaaagtctcatctgagacaaggcaagtcacttctgcctaggagccataaaatcaaaagcaagttagttactttctaggtacaatggaggtaccagcattggttaaatacacccattccagatgggagaaattggcccaaacaaaggggctccaggctccatgcatgtcaaatccaatgaggcagtaattaaatcttaaagctccaagataatctcctttgactctgtgtctcacatccaggtcacgctgatgcaaggtgggctcccacagccttgggtagctccactcctttggcgttgcagggtacagcccccttcctggctgctttcacaggctagcattgagtgtctgtggctgttccatgcacacggtggatcaagccctcttctcacagctctactaggcagtgccccagtggggactctatgtgggggctccaaccccacatttctcttctgcactgacctagtagaggttctctctgagggccccatctctgcagcaaacttctgcctggatatctagacatttccatatatcctctgaaatctaggtagaagttcccaaagctcagttcttgacttctgtgtacccacaggctcaacaccacatggaagctgccaaatcttggggcttgcaccctctgtagccatgggctgagctctatcttggctccttttagccatggctggagtggctgggatgcagggcacctagtccctaggctgcacatagcaggggggctctgggcccggcccaggaaaccattttgccttcctaggcctctggtcctatgatgggaggggctgccatgaaaacttctggcatttcctggagacaattttcccattgccttggtgattaacatttggctcctcgttacatatgcaaatttctgtagtcagattgaatttctcctcagaaaatgagtttttcttttctattgcatcttcaggctgcaaattttctgaacttttatgctctgcttcccttttaaacataatttccaattccaaaccatatctttgtggatacataaaactgaatgcttttaacagcacccaagtcaaatcttgaacactttgctgtttagaaattccttccaccagatgccctaaatcatctctctcatgttcaaaattccacagatctctcggacaggggcaaaaagccaccagtctctttgctaaagcgtagcaaaagtgacctttactacagttaccaagaagtttctcatctccctctgagaccacctcagtctggactttattgtccatatcactatcagcatttgggtcaaagccattcaacaagtctctaggaagttccaaactttcccacatcttcctgtcttctgacccctccaattctctaggaagttccagagtttcccatactttcctgtcttcttctgagtcctcccaactgtttcaacctctgcctgttacccagttccaaagttgcttccacatttttgggtttctttatagcagtatcccactctctgtggtaccaatttactgtattagtctgttctcatgctgctataaagaactacctgagactgggtaatttataaaggaacgaggtttaattgactcactggtttgcatggctggggaggcctcaggaaacttacaatcactgtggaagcagaagcaaacacatcctttgtcacatgatggcaagaaggagaagtgccgagcaaaggaggaaaagccccttatgaaaccatcagctctcatgagagctcactatcataagaacagcagcacgggagtgaccaccccccatgattcagttacctcccactggatccctcccatgacatctggggattatgggaactgcaattcaagacgggatttgggtggggacacagccaaaccctatcactgcctttaagatctatgaattgtttttctacattgaagaaatttgtagacatttgttttttattctctttttggtttgctgagagcagtagtctcttggaagtgagtttcatttacattttttcctttgggtgtcaaatatataaaatattttttaaaatcaatggctgagggataaatgagggttggtagaaagggaaaggataagggttgtagttaacggaccatgttttaatgtgtctataattagatggaagttgtctcttaccattcaacatcctggatggccttcctatagaggacattttcatcttcttttgtcgtccagagctagcatatgtgtttcatgtctttagatagtgaaaatcaattcagattttcatggaaaatgctctctcttcatcctaaagacagaattgtcacggctatttcgtttattgaaaagtgaaacctgctacagttagcatatagttaattccatatatgttacctgtatcatttaatacattcacaaagtaaaaaaccaaattttgccaagttcttgatagtaacaatagtaaaatggaatttctgttggcatattttcatgttattctgaaatgctgaatggatttattaagattgataacaatatgttgtacctttatgttctaaaatttaataacagttattcttccaaacatgccagcgtcctcaatagttgacagtctgcaaaatattctattatgcaatcagccatatctccttcttgagctttctttaagtacttgtatcctgtatttttccctgaaatctagcagtaagttgaagaaatgataaacaaaattgtatcattgtatataatggctatttataaatactgatgtacattttcataatgttatttaaatgattacttcagatatgtatttctgttttctacattttaacttctcaacatattaggttgttatcttagattggattttctaagacatagactctaagacagagatttccatgcagatggtttcttagtgagtgcttttaagaaaaatgcctgggagggagtaaaggcagcaggattgaggagagagaggagttgaatgatgatgcagtgaaatggaagatcttatctggtcccatgtggggttgggatgaccatttagagtattaccgtatgaagcaaggaaggtggaccattgtatccctaatccattagtcattagatgtgagcctcccaactaccagcttccgggcaatatcatcttggtcaaagaagtgcctgtctgctgagagaaatttcttggaagagcttaggtatgatctgttagtagataacaatcccagcaactgggagaatgaatgcttcatttgtaattggtgaatctcggtggcacaccacagtgttcgctacggtaatctttatacttattgagacatatattgtttttaagtaaaacttgtatacctagtaatgcatttaggtagtgtattggccaagctagtcctttttggaaacaatttcattgtggtataaatgatatacaataagctacacatttaaatagtacaatttgataagttttgacatatgcaaataccagtgaaactattagcacagtcaagataataaacatatccaatatcctcacaagtctgttttcggtaatcactctctcctgcccctcccttgattcccaggttaccactgatgctgactggcattatagataagtttgcgttttatagaattttataaaagtagaatcatgaagtatgtaccttatttctggtctgccttctttcactcacaaactactaactttcattttgtgaataatatgatctccgtgtgattacacacattaagaaagtcaataaaaacattgtaatttgattccgatactagtttatgggtctacattatgtatttaaagatactatcatgtttggattagcccttaggtatcaagtaaccctggagttgaggcagttactgttttatttgctatcaatctttttataagctcaccttccactaattacccaaaaatatttgatttaatacctgagtacagaaaaagaacatattcacaatgtttaaattttataatttaatattataatttacaacagtttaaaataactagtcctgaaattgagtatttctcacctaatattctgctctatttattacccactccacgaaaaaatttcccagaaaaatcacaaacatgtctcttgagtgtattattacccaacccacagaagaatttccaaaaacagtcgcaaacattctctcttgagtgcaaccattttctcgggccagccattcattgaaacaaaatagcctgtataacttctgtgggtagacatttgtaggttgttcttttgaggcattagtgctattgcatttaagataaagaaataacgaattcacaaattttataaagttctcttaaatttaccaagtcaatagcaccaccactttgattcctataacctgtgacttagttaggcttctcaattccaagaacataccaccattatttcttataatgtcctcagattaaaacatgtgttgtcctttctttatacctccctgcactttaattgaatattttgccatttactggattctgtacactttttatgttttcatgccctcccttttcattctcctggacatcaatcgcaagtcagtagataccttgtaagagatctctctccacccaaatcactgtttcttttgaaagagttaacctttctgaagcagcactcctgcttcacatttcccagcacaggaaccttcagtgtttctctgttgatagctttgatttcaaacgggtagccccaggagaaaagagagctgaaggatatgttttgcttggctgctttgtttgacctgcaaggaacattaaaaggcaatgaaaccgggcagagactggactgatcaacaccatcagtttagcacttattgctatactttctaaggctttacaattttatgtgtcccacgtgtcccctgaaggcatttgattttctaacctcctaggccagaggctaacatccagaattcatagtctggcacttataaaccctaacttagcttctgtcacttgtatctctatgcaactctacagcaaaatgtacttattttctctaaaatacccttattccatacttctttggagtgtaattttatatataaaagtcctcaccacctgtaaacattaggaagctttgattcgaagaagcagaagccatctccatttaactgaagtgaaatgaaacttactggagggataatgtatagttcttggaaatgaaggaaaagaaggcaactgtggcagagggagggcagcactgagagtcaggaactccagggaagttactttttggatgctgtcattaaaatgcttcagcttcaaattgtactgactctacctttctcaattctagattcaaatttctaaatgtaattggcataaattaggaacttgtcccaccagtttatagagtttacagagcactatgattataggtccccctaagatcatgcagaatgagggaagagtaatttcatccaaggaaaagcagggtaccattcaccaaagagtggagatacttattcagaacaattaatgttagatgccacaaaaaaactaaccctgaaatcaaagtggcctaatgaatgcttatttattgctcatataaagtctgatataaatcaggtagcattccttcacagtgactcagggacctaaattgctttcatcttgtggctctgccatgtcaacattgaaacttcagaggtattgacaaaggagagctgagaaattgacactaactatcaagtacctcaggcaagaagtgatgcatcacttcctacactttcccactttccaggattcaatcacaattgcactcacgaaacctcaagggaacatgagaaacataatgaaatcaataccaagatatccaaagagtactaattttcttcaccacagaagggatattggacagacaaaaaattttgggacagaggaatatccactaaatgatccttccatgccctgctcagatgctacattttccattaaggctctcttgaccaacccataaggagatgatctccaactcctctgaacatctggaacattgcattctacttatttttactgtctcctattgtaataattgttggctattccttattagacaaattataagcttttatgggacggtgatcaaaagtcctaatttatcttgtcttcctacagcattcaaagcattgtagaccttcaatacatagcagtcttcgaagccagagtattagtattttttctaaaactgtattcatcgcaacgaactcgatggatgttcaataaaaatgtattgaatagtcattcatgcagatagcaaatttcttaaaacatttcttactcaatgtttacttatattcatcatgaatataaatttaatataataatatcaaatcccattacatttagtacaaagtaaatataccaataattttatatatgtttaagtgaatttttatatttcatattatttgtgaatgatacacatcgtcgtggaaaatttacaacgttgaagtaaattatacaatatagggtatttgtattaaaatacatttcatagaaggtgctttaaatttaaaaagttagcatgaatacatattaaatgtaaaagagtctttaaaatgaaaaatatttcacacttgtgggtttgatctaaaaatatcagtcgctatatgatatggctagacagatttgagtaggtataattttaatgaataatattgtgtgatattttagggtccaaaattgaatgtttctattaagtaacagatatttaaatgccaagcagaagctacactggcaaaacaagatttagtatgttatcttaagtgtatcctaaatcctctttcatcttatggagaagaaatacatgcttttagtttccagccactcctgtctatattcatttaaaataaactattatttatatcagatatgatgccatgtgagtccacaatttgtagtatagagaaataatttcattgaattattttggctgtttgtacctgagacctgattctgaatcatttatttttctatttaagttgtgctattttatgatcctacctatggctatgttcaaaacaatgacaaaatatattttaccctgatctttttttcattattatactttaagttctgggacacacgtgcagaacgggcaggtttgttgcataggtgtacacgttccatggtggtttgctgcacacatcaacccatcatctacattaggtatttctcctaatgctatccctcccctaaccccccatcccctgagaggccccggtgtgtgatgttccccgccctgtgtctatgtgttctcatcgttcaactcccacttatgggtgagaatatgtggtgtttggttttctgttcctgtgttagtttgctgagaatgatggtttccagcttcatccatgtccgtgcaaaggacatgaactcattcttttttatggctgcatagtattccatggtgtatatgtgccaattttctttatccagtctatcattgatgggcatttgggttggttccaagtctttgctattgtaaatagtgctgcaataaacatacgtgtgcatgtgtctttataggagaatgatttataatactttgggtatatatgcagtaatgggattgctgggtcaaatggtatttctggttctgtatccttgaggaatcgccacactgtcttccacaatggttgaactagtttacagtcccaccaacagtgtaaaagcgttcctttttctccacatcctctccagcatctgttgttgcctgacttttgaatgttcgccattctaactggtgtgagatggtatctcattgtggttttgatttgcattcctctaatgaccagtgataatgagctttttttgatatgtttgctggctgcataaatgtcttgttttgagaagtgtctgttcatatccttagcccactttctgatgggtttttttttttcttgtaaatttgtttaagttccttatagattccgggtattagccctttgtcagatgtatagattgcaaaaattttctcccaatctgtagtttgcctgttcactctcatgatagtttcttttgcagtgtagaagctctttagtttcattagatcccatttgtcaattttggcttttgttgctgttgcttttggtgttttagtcatgcagtctttccccgtacttgtgtcctgaatggtattgcctaggttttcttctagggttttgatggttttcggttttaggtttaagtctttaatgcatcttgagttgatttttgtataaggggtaaggaaggggtccagtttccgttttctgcatatgactagccagttttcccaacaccatttattaaatagggaatcctttccccgttgcttgtttttgtcaggtttgtcaaagatcagatggttgtagatgtgtggcattatttttctggcctctgttctgttccattggtctatatatctgttttgctaccagtaccagtctgttttgcttactgtagccttgtagtatagtttgaagtcaggtagcatgatgcctccagctttgttcattttacttaggattgtcttggctatacaagctcttttttggttccatctgaaatgtaaagtaatttttcctaattctgtaaagaaagtcagtggtagcctgttggggatagcattgaatctgtaaattaatttggacagtatggccattttcactccactgattcttcctaaccacgagcatgaaatgttttttccatttgtttgcgtcctttcgtattttcttgaacagtggtttgtagttctccttgaagaggtccttcacatcccttgtaagttgtattcctaggcactttattctctttgtagcaattgtgaataggagttcacccacgatttggctctctgtttgtctattcttggtgtataggaatgcttgtgatcttttcactttgattttgtattctgagacttggctgaagttgctcgtaatgttaggggcagccagagagaaaggctgggttacccacaaagggaagcccatcagactaacagtggatcactctgcagaaaccctacaagctagaagagagtgggtgccaatattcaacactcttcaataagggaattttcaacccagaatttcatatccagccaaactaagtttcataagcaaaggagaaataaaatcctttacagacaagcaaatgctgagtgattttgtcaccaccaggcctggcttacaagagctcctgaaggaatcactaaacatggaaaggaaaaaccggtaccagccactgagagaaacataccaaattgtaaagaccatcgaccctatgaagaaactgcctcaactaacaggcaaaataactaaccaacatcataattacaggatcacattcacacatgacaatattaactttaaatgtaaatgggctaaatgccccaattaaaagacacagactggcaaattggataaagagtcaggaccatcagtgtggtgtattcaggagacccatctcacatgcaaacacacacataggctcaaagcaaagggatggcggaatattttccaagcaaatggaaagcaaaaaaataaaaaattaaaaaaaataaaaaaaaaaacaggggttacaatcctagtctctgataaaacagactttaaaccaacaaagatcaagaaagacaaagaagggtattacattacataatggtaaagggagcaacgcaacaagaagaactaactattctaaatatatatgcacccaatacaggagcacccagattcgtaaagcaagttcctagagacctacaaagagacttacactcctacacagtaatagtgagagacttttatactccactgtcaatattagattaacgagacagaaaattaccctgatctttaacattccaggcaagtatgttttcagtcatacatagtacgtgaatctgttatattttaaatccaagcttttggaggacaaatgatttcacagttatacaactcagcctctcccagactcaagtctctcacttgatgcagtattcccaccccatcttcaataaaagaagaaagcatgaaacatcgcattgatatagggaaagtatatctgagttttctatatagcatataaagaagtaaaataactctgtgatttgtgatgagatagatttagctgcaacaatgaggtctggatattaatattggattaacttcctttgagattgcaacttccatgtggcattcagcactttccttgttttctcatatgtaggccgagaataaaattatcctgtttctatttcccaacatgaaaggtcttttaactgtttgaagacatatgtttcatgtgaaaccaaggaattgctactgcaattttgtaagacagaagttagcaaacttattctgtaaggaacaagatagtaaatattataggctttgcgggccatatggtctatctcacaactattaaactctgccatttttttttttttttgcaaaagcaaccatagacaatatgtaaatgaatgagtgtgattatattccaataaaactttatttttaaactacaagactagttcttaaaataaaatttaacaaagaactattatatgatccaataattccacttctgggtatatacccaaaataattgaaaacaggtattcacacagatatttgtacacccaagttcatagcagcatattttactgtagagaaaaggtagaaacaaatgtacactgtgtacactgaccaagaatggagaaacaaaacgtggtgtatccatacagcagaacagtattctgctttaaaaaggaatgaaattctgtcacatcctaaaatagggatgaactttggagatattccacctagagtagttaaattcttagacaaatagttgcatggttgccagggaccagggaggggtaggggaaatgagcagttcttgtgtcattggtatagagtttcagtttagaaagatgaagagttttggagatagatggtggtgatgtttacatatccatgtgaatgtatctaatgccactgaactgtatacacttacaatggttgaaatattttgtatattttcccacagttaaaaaagacaagcccatgtgcccaaattgctgatataaatctgtattcctattagtgagcagtaatgagccatgtttagtgcagctgatatggttaagatggaacaattgcatgtaatgcaatggtgggtaacatctaataaaaattggtactcaccaatttccatttccattgtggatataaacacccttcacattatgaatcatgttatttgttatttgtgtacttacttattaaatcacttttctccatctctctcacctctatgactctgtacatgtacaaacaacatacacactgtgaacttctttagaatgacagttacattttcgttacttgattcattgtttggccaagtagatacccagtaagcataactagcaagtgaataatgtatatgtgatcattttccttttcaaaaaccacttcttatctctaccacaccaccacacattattatatgctacacttcttatataaaacaaaaaagaataggccaggtgtggtggctctcgcctgtaatcccagcaatttgagaggccgaggtgggcagatcacttgaggccaggagttagagtccagcccagccaacatggtgaaaccccatctctgctaaaaatacaaaaattggccaggcgtgttggcgcatgcttgtaatcccagctacttgggaggctgaggcaggagaatcactggaacccaggaggcggaggttgcagtgagctaagatcatgccactgccctccagcctgggcaacagagcaagactctgtctcaaaaacaaacaaagaataaataagctttaataaactcttttgcagaagagttttcatttttaaacatagaggaaaaagaagatgaggatgaacgatagtgatgcccagaagagaaaattgtgtaagacaaaatcaattgaccaggcgtggtggctcacgcctgtaatcgcagcactttgggaggctgagacgggcagattatgaggtcaggagttcgaaaacagcctagccaatatggtgaaaccctgtctctactaaaaatacaaaaattagccgggcttggtggtgcacgcctatagtcccagctacttgggaggctgaggcagaagaatctcctgaacccagcaggcggaggttgcagtgagccaagatcacgccactgcactccagcctgggtgacagagcgagactacatctcaaaaaaaaaaaaaaaagattaaatcaattttagattgatatagagataaataattccctaagtacaattaaagcaaggatcagaccctgatgagtaaggatgatctaacaaagggctgacaatataaagtgaatgcgattgtcaccaaataaacatctcccaagagctttgggacaatcttcagctaagcatattctgcactttacatcgttctgccatatgccctatgtagcttttcatcctccagaaatttgaatagcacacagtattttttggcaccgagtaattgtggaacttaaacttcctacaaagagagaagctgtttcagtcagctaagtgaccagttagtaagcaacttctattctcttagtgtcgatagggttaaagacagtcataagctccccaaacccttggccgcctcaattttttcatttaaatacttatcttcttatcttcatctattttttagagtcacacataaactctgtctatgaggttcttaaagacctggacaatatatttaatctctgtatccttaaatctcaccatgatatctcaaagatggtagataaaactgttttccctcacttctctgactccataccaatacttaatcgatcgggaaagttttataaaccatttaccgttgaatataaatatatatacacacacaaacatatatatatttatatatatttatgtatatatatatttatatatctatatatatttatgtatatatttatatatatttatatatatttttatatatttatatatttatatatatttatatatttatatatatttatatatatttatatacttatatatatttatatatatatttatatatatttatatatatttatatatatttatatatttatatatatttatatatatatttatatatttatatatatttatatatttatatatatttatatatatatttatatatttatatatatatatttatatatttgtatttatatatatttatatatacacatatttatatatttatttatatatgtttatatatatatatatatggcactatatatcagtgagcaaaggcatcataatctttatttttatttctgtattcatttattcaacatatagtaattctgatcctgtctcaaaaactctacagaaattaacaaagaacacattgtttctgcctttttggagctgaatgtttagtgggggaaaatgtattttaaggcaataatcatatacatgagtgtatatttacaagccgcagtaggtgctatgaatgaaaagtataaggagctatgagatattctaacaaaaagaaatgctgcagtctagagactgagagtaattatctgtgaggaaaagtattgaagcagagacctgcaactcagtaaagagtgtagggagtcacatgaacaaagtcttgagatgttggtagagatcttggaatgttcgaaattctaaaagaaagcccttgtgtatggggtatggtgagagagggagagcgtggcaagttttacgttgtacaagtcattgtaggccacaaaaataagtatagattttatctaagtgcaacggaaaaccattacaagtttattttttgattcttaaattttgttttacttatttatttatttcaagacacaatctcactctgttgcccaggctggagtgcagtgacatgatcacggctcactgcagccttgaactccttgggctcaagcaatcctcccatatcaccctcctacctcagcttcctgggtagctgggactactacaggcatttgccactatgcctggctaactttaaacaattattttgaagagacagggtcttgttacgtttctaagtttctaaggctgatcttggattactgggcccaagcaatcctcccgcctcatcctcttaaaatggtgggattacagatatgagccacctcacccagcaaggtagtgacataatcattgtttttgctgaaaacaatgtactttagggaacctccctgaaaacagaatggccacttagaataccaaagcatagaccaagccttgagatggcaatggaagtggaaataaacatgtctttgatacttatgttaatggagctattagtagcaacttttgacagatttgaaagtggagttgaaagacagtgaagtgtcagggatgatccctgagcatattagataatattgagctggagaacagaaaagaaggggcagatttggaggtggagacctttctagatttatattcaatttgagatacatctgaaacatctacatgaaacgtggatgaaatatctgtgaccaagatacatacgtgggatacctaggcatgtaaataatatttaaagttatgtgagtgggtgcaataacctaaagagagactgtaggtagaagattgatcaggacaaatctttgaggaacttttttttttaattattattatactttacgttctgggatacaggtgcagaacgtgcaggtttgttacataggtatacacgtgctatggtggtttgctgcacccatcaacccgtcatctacattaggtatttctcctaatgctatccctaccctagccccccacccccaacaggcaccagtgtgtgttgttcccctccctgtgtccatgtgttctcactgttccactcccacttacgagtgagtccatgcagtgtttcattttctgttcctgtgttagtttgctaagaatgatggtttccagcttcatccatgtccctgcaaaggacatgaagtcatcctgttttatgaggtacttttaatgcatttagtgactgggtaaggaataaccctgaaaaggagcacaaaaaccatcgaggtatgaagaaagccaggagatgtagtttcacaaagcagccagtggacagtaatggacaccagcataagcttaagacagcagtgatagtgttcatcagtgctgaaaactcattggaagtggctgaccatatgttgattgcgaatgcaatgccttctcccatctcctattgcttttcactgtttccgtcatgtccagagtgaaaacactggggaggcagaactgtgtaccaagaaaaatgttttgtgtcagaggaaacaagagctcattaatttccttttgacccgcatggataggaatacgataagcaggagaaaaataaaacctgctaaactaggcaaataaagcttaatagaaaagagagaaaatattgcttacaaagggaagaagacatttgccacaatattagctaaaaagagagtgaggaaaatccacatttaccatttttattatgtgtttccaaagtcgacattaagtgaatattatcactttgaagacagagaatagattgtaagcagaagaggaagtgggattttttaaatggcatatatttaaatgttgaaaaacccatttccaatactcccactgagatatatgcaataaaaacactccgcaatcagtaatatacatgtgaagctcctaaaaatcctccattgagaagattctataaaactataaagtattattatttctgctatcagaaaataaacacatactttctaagaacaagatgaagaccttaattcatcttcccaggaatatacttgtgtacttaatggttcaaggcgtttgtgatgcaaaaaaagtgggacattatgtacaaaatagttttaatcagaaaatgaaggaagtttggtatggtatggttctagggttgcaagttttcctgcaaaaagggagtacttatggctaggtgatgcagccaaggaagcatctctgaggacaggttatcctggctcctattccaaaatatttaggtctccttgagtgttcgatccttgaaccaaggacaagaatagaaagaaataaaagccacttgtataaaggttgccttcattttgtgtcgaatattgacaggagaaagccagatttgtagcttttccagggataagtgagtctcagacacagttaagagcttggctttggaattagattgacctgagtttgaatcgtggctccatcaatctctgattgtgtgaatttttggcaagttttagctgaacctcaattttctcataagtaaaataggcataatacagctatgattctgacccttgccattagcactctgagctacttgtcagtgtatcctggtctcttcctcaagcacttttccactttgttatttcaagattctttgaaattatgaacagtagctcttgatcaccaaacaaatgggagaccatagattcaaaggaacattttagtaggatatttgataagctttgtatttttttgtgctttgaaaattagagtagatttagatttaaggaactataaagctatatgtttacaaaactttattcagttgggcagttctgactcagtaactgaaataaaattgatgaaaacaaaacatatgttttactgttgtgttcacatttaaagattatttaatgcataaccaaaataggttcagcaaatgtttatacatacatgtacttagatatttgtaattcttatggtagagcatgggaatgaatgagaattctcctaggctggaataaaactaatgtctaactaagaattggcctttcacttcacgaatatatatcattatatataaaagattcatcctttgttaacttatttgtttagcttagtactttctaagtacttttctatcctgtcttggtccctatataagaatgatactattataaaaatgaacatcctattatttcataatgattagcatatcagcatatttaagagcaatgcctatatctttaccttcattattattttcatgtttaaaatcctgataattctagaaaaacaaggttgtaattatccattcataataaaagtcacaccaagttattcttgataattaacttggcatagtggagtgcactgagcaattaataattaattacgtggttactagctcaaattttattgagaaccaaggagttaaaattaatagtattgtgtttgcaatgagttaattactttgtttctttgtttttttttttggaatagtgccataattagtatcctaatagaaacagaatataaagtgggtttctgagtgcttgcttgtcgaggtgtgtaacaacatatattttaattataatttgagtcactaattgttgtcaaatacaattttaatttcttagttcagagattaaaagatatgtaaacagctccaaaaaagaatatgataagatggtttatacaagtaaataaataactatatgacttcagaagttttatttaacaacagttgtataagtgttttaactaatgttaacaatgccttttttgtaaatctcctctaccacaaatatgagataaatttaagaacggcattttcattaaatattgattattaaaattcatatataagtattggctgtacctgagcatttacagtgaaaccatgaaggactggcaggtttggggctgtttgataatatccttccttaatctttcttcgtagcatcattgtttaattttggctgaccacaatcacttatgaaaagaaacagctcaaataattagtataacctctttctcttcataaaaccttcaaatcaatgtggtcataattatgaaagtgtaagattataaaatcttctcatttaaatatacatcttcatattagcagacttggctaatttcttcatttatccttgacatccacacttaaactctgtcaaactggtcattcatagactcattattcattcaacaaagattagtgtgaccctactatgattctgagggctagaaatataaaactgaataacatataaaccctgatttctgtatttatatatacagaaaggaattatgaactcacagttttaatgcacagtgacgagtcctcagttcatgtctgccttgggagctaggcatataccaaagcaggactgtctaacacagtttgggggtctcagtctggaaggatccgggtgagatgatccttgaattgagttctaaaaaatgaggagaaattatccagataatggaaagtttaggagaaattaaccagataatggaaagtttaggaaagaaacactatttatatgtcaaggacaaagtttgaccaaatgtgtctctgaatctaactggctttatgtaagataaaattaaaaaataattgtcactaaggtttttcacatctgcagcaactaccatcatatctggctcaatatttaaaagaaatacttaacgatttttggcatttattgctactataatagattgtgctatttaaagagaaattctagatacatgccaaagtattttcaggtgaagtaatgtgattcgtgggttttgttttgacaaacttccaaggaaattatttttaatataaagagcaatggaggaagattaaacaagattcgcaaatgttgataattgctcaaggtggtgacaggtgcatgggggtccataatatactgttctctttacttatatatgtctttgaagattttcatgatgtaaaattttaaaatcagaattacagtaatacctctttctttgacaatcgttttcaaacttggttcaacaactgaatttaaattacctacatggctataaaaataaattagatatcctggttatttggtctggggtgggtcctggccatatctgtagggtgtgtgggtgtgtgtgcatttagcttcacatttgactctgaagtacgtggaaaaccaattctgggctctacatatgcaattccaatgcctgacattaggtggtgctggttgtgagccatgatttcaggtttgacttgtagagttaacagaagtgatatcaccaccgatcccacagaaatacaaactaccgtcagagaatactacaaacacctctacacaaataaactagaaaatctagaagaaatggatacattcctcgacacatacactctcccaagactaaaccaggaagaagttgaatctctgaatagaccaataacaggagctgaaattgtggcaataatcaatagcttaccaaccaaaaagagtccaggaccagatggattcacagccgaattctaccagaggtacaaggaggaactggtaccattccttctgaaactattccaatcaatagaaaaagagggaatcctccctaactcattttatgaggccagcatcattctgataccaaagccgggcagagacacaaccaaaaaagagaattttagaccaatatccttgatgaacattgatgcaaaaatcctcaataaaatactggcataccgaatccagcagcacatcaaaaagcttatccaccatgatcaagtgggcttcatccttgggatgcaaggctggttcaatatacgcaaatcaataaatgtaatccagcatataaacagagccaaagacaaaaaccacatgattatctcaatagatgcagaaaaagcctttgacaaaattcaacaacccttcatgctaaaaactctcaataaattaggtattgatgggacatatctcaaaataataagagctatctatgacaaacccacagccaatatcatactgaatgggcaaaaactggaagcattccctttgaaaactggcacaagacagggatgccctctctcaccgctcctattcaacatagtgttggaagttctggccagggcaatcaggcaggagaaggaaataaaaggtattcagttaggaaaagaggaagtcaaattgtccctgtttgcagacgacatgattgtttatctagaaaaccccatcgtctcagcccaaaatctccttaagctgataagcaacttcagcaaagtctcaggatacaaaatcaatgtacagaaatcacaagcattcttatacaccaacaacagacaaacagagagccaaatcatgagtgaactcccattcacaattgcttcaaagagaataaaatacctaggaatccaacttacaagggatgtgaaggacctcttcaaggagaactacaaaccactgctcaaggaaataaaagaggatacaaacaaatggaagaacattccatgctcatgggtaggaagaatcaatatcgtgaaaatggccatactgcccaaggtgatttacagattcaatgccatccccatcaagctaccaatgcctttcttcacagaattggaaaaaactactttaaagttcatatggaaccaaaaaagagcccgcatcgccaagtcaatcctaagccaaaagaacaaagctggaggcatcacactagctgacttcaaactatactacaaggctacagtaaccaaaacagcatggtactggtaccaaaacagagatatagatcaatggaacagaacagagccctcagaaataacgccacatacctacaactatctgatctttgacaaacctgaggaaaacaagcaatggggaaaggattccctatttaataaatggtgctgggaagactggctagccatatgtagaaagctgaaactggatcccttccttacaccttatacaaaaatcaattcaagatggattaaagatttaaacattagacctaaaaccataaaaaccctagaagaaaacctaggcattaccattcaggacataggcatgggcaaggacttcatgtccaaaacaccaaaagcaatggcaacaaaagccaaaattgacaaatgggatctaattaaactaaagagcttctgcacagcaaaagaaactaccatcagagtgaacagggaacctacaacatgggagaaaattttcgcaacctactcatctgacaaagggctaatatccagaatctacaatgaactcaaacaaatttacaagaaaaaaacaaacaaccccatcaaaaagtgagcgaaggacatgaacagacacttctcaaaagaagacatttatgcagccaaaaaacacatgaaaaaatcctcaccatcactggccatcagagtaatgcaaatcaaaaccactatgagatatcatctcacaccagttagaatggcaatcattcaaaagtcaggaaacaacaggtgctggagaggatgtggagaaataggaacacttttacactgttggtgggactgtaaactagttcaaccattgtggaagtcagtgtggcgattcctcagggatctagaactagaaataccatttgacccagccatcccattactgggtatatacccaaaggactataaatcatgctgctataaagacacatgcacacgtatgtttattgcagcactattcacaataacaaagacttggaaccaacccaaatgtccaacaatgatagactggattaagaaaatgtggcacatatacaccatggaatactatgcagccagaaaaaatgatgagttcatgtcctttgtagggacatggatgaaactggaaaccgtcattctcagtaaactatcgcaagaacaaaaaaccaaacactgcatattctcactcataggtggggtgggaattgaacaatgagatcacatggacacaggaaggggaatatcacactctggggactgtggtggggtggggggaggggggagggatagcattgggagatatacctaatgctagatgacgagttagtgggtgcagcgcaccagcatggcacatgtatacatatgtaactaacctacacaatgtgcacatgtaccctaaaacttaaagtataataaaaaaaaaaaagttcgttcctcttgttagaattttcatacaaatgcaagactccttattttcaaagagaaaacaaaattttatataaactaatacctgagaagaataggaaaaattaatgatgtatgggataggtactgataagaacctcttcttttgtgtacattgtgataaactaatgtttaacttgagtcgatgtgctggaaatacttgttaaattttcaagaattttgagatctgttaaacacaaccattatcaaaaattaaattatggtaacttacattaaatgaaatatattgttcacaaatgtactagatgcacaaaagtcatcactacctaattcttttattatatttcactattatctacgggtttgttacctgtataatggaatgactgtataatggtgtagtgctaacttcatgtttggtgacattataatgatagcttaaaattaaacatactgggaatattcaaatatgtccttcctctcaggggatctgattgttagacatttaccagcatagcactgtcttaattaacatcatataattgtcttttatccttaagatgttgagccagtaaatatcacaggagagtttgttccttaggttttaatacttgctttaccagtttactgtagcatcatgtgaaaccagcttctagaccagctgtctttaattggtatgtacccaagctaatccttgtcaggctatcatcaacccaagcacttttgaagttatttttattattacgctacagaaagattttatggcctttttgctcttttctttaccctagccctaggatcatataatttcatctcctatttattcctatttatttccttatctaaaatcttacttaactagcttgcttgcctgcctgtctgcctgtctgcctgcttgcttggtttttctttttttctttcttttctttacttctgctttcctttcctttcttttgtttcttccttccttccttccttcttcctttcctttccttctgttccttttccttttccttttcctttgcgttcctttgctttccttgctttcttcgcttgctttcttttcagtaccacaaaaaaactaacaataacaaaaatattgctacaaaaattgtgacctcccaattctatcctcatttcacggacccataaaatgattatatatctatgccaatgcgttctaactacatgatattattattgatgataagagaatccaaccctcaagaaatgaagtattataatgttttagaacacacagaagcatttttaaccaaaatgttccatgtgattttatagggtgcatgttttaccttttcttatttggaaaagtagcaaaagtattaacaaataaaataagttacatactctttgtatataaatctttcgtgtacataataatgccatttcccttctagtgcttccattattgaaaaaaaatagacatatagcaacgtgctagacattgaagttaactgttaaaaagtcatcagagggtaatgttaaaggtggtatttcaggtaataaagcatatgcagaatgattctattggctttatttccaacatgagtgttattagtaccaaggacactgaagtttaaaggaggggagtgatgagactgatcattactttgtcttctgtaacaggacttaggtggcccagagtgatccttgttggttgattggttagttgaacttctatttttgttactaggcctgcagatctgtggaatctccagagtgctgtgtaatgttacataggccacacaccagacactgttccctgaaggactgaaggtggaattggaacaatatgtagacagttcttgttgcagttaccaaggaaatttggttaggattcaggcctccatgtcagaaaaggaagtctattttatgtgctagaaaaataaccctaatcatcttatcttgggtctctctggggagcatgatgatctacctggtcttgtaaactgtatagaaccggctgggttgagacacatatgtctcataacagagcttccacttaaggctataaaatagtggtccctctattgggtatatgccttatggaaaaatatacgttatgctggtacctattataaaaaccaatgcaaaatgattagagatttctaatccaagtgttatcctcatctgctcccaaaatacagcaatgaaaaaatagaaaataaaaaaggatatatttacagaactgtatttacagaaatatatgttgatgacaagataatcaaatacatatcaaatcatgatgtgtatttacagaaatatatttacagaaatgtaaagcagagaatggggcggaagtccctgacagacttgacactgaaccacaaaacaacagtggaagccaggaatttggatgctgcgggatagttgggattaaaattgcttcaagcaaggtgtggaactggagacaaactcagtattcaaaaccagaggctgggctgtggtgcttgcattcgtgaaagaaaacctggggaaaaagtgcttcttcaggctgtagcctgacgctatggcttgcctaaacttatgggcctatgtaggtgtaagaataaagacatagccttgctgctgggaactgtgttgcatctgttctcttgcttgatgaatggattgaaattatccccagtaacattgcagtgcaagaactttaaaccttaaaggggtggctggagaccacgggacgcgatgcacatgcaactactaaatgctagatgaggatacctgaggagagagaacaagacacaaacgtgaacatggacctccaatagaaatgacaatcgaaaacatacatttatcttctctctctcccaaattgttcaaagattacgctaagggaataaaaacaatacagtcataaaatgacaaataaaatggaagaagagacatctgcacagacatatcaagtcaatgagatgaaaattaggacaagtaagccaatttgtttttcaggatcccagaaaaacttgtggattgaagacgctaggtgttttagaaggccatatattcccgagaggggctggaaataaaggggttgttttgaatcccttaaaaggggcaattacatttcatgtccccagctcagggtagttaattagacactactcctctctcatcccagcagacgtgagtgagtggtttgctttctggtgaggctgaaacaacttttggcatttggacaacaggattagttgatggaagagagagccaccatactgaaaatacaggattaagttaaagtcaacatatttaatggtgagaccagcagtccctcttcaccttcttggctcttaagtttctatcctctgggcagtagattataaatttattctcctgagagcctacctgcaatacgaaaactatttttagtcaagttttattgctataacaaaataccatagactggatgccttataaacaacagacctttatttctcaccgttctggaggctgggaagttcaagatcaaggcactggcaggtttggtgtctggtgaaagctcatttcctgtcttctcactgtaacctcacaaggcagcaggtccaagggaactgtcttgggcctcttttgtaagggtactattctcattctggatggctttggccttatgacctaattaccttccaaaggccccacttcctaatgtcatcaccttgagggtgaggatttcaacgtataaattttgcaagaacacactcagatcatagtaacctacaattaatgatatgtaatgatccaccagtgaaatagccagatctgtgcctaatgaccatatattgaagcccaccaagtataagccctacatacgcacaaggaatttccaaaagcatttaatgcctcagttttaagagacaatcaaggatttccagatatttgaacatgtctcaaagatggaagacagaaaccaacataaaaacaaaaagcagaaatattgggaaaaaaacaatagccacataaatgaaacagaaatctctgcagaaagagagacaaggcatagaccttaagaaaactttttaaagatagctataaaattattatctcacagtgagactagtcactgtattcataagaaagaacaagagactatagaaggtggtatttccgagaaagataagggttatttaaattaatagtatagcaggttaagtttttaaattcttaattgtataaatttatgggttaccagtgtaattttgttatatgaatatattttatagtggtgaaggcagagcttttagtatatccaccactggaataacatacatggtatgcatagcagttttagagcaatgaaactactctgtgtgatactataatggtggatacctttcattatatatttgtccaaacccatagaagatacaacatcacaagcaaactctaatgtaaactatggacttcgagtgttaatgatatatcaatgtatgtaagtcagttataacaaatgtaccactctggtgtgggatgttgatagcggggtaggctgtgtgtaatgaggaagggggccagagagtatacgggaaatctctgtactttcccctcgattttgctataaatgtaaaattgctttaaaaaatcaagtctattaaaaatgaagagcagaaataaaagttcaaaagtagaagataaatttgaagaaatatctcataaagcagtataaatagccaaaagcatggaaaatgggagagtataagaatcttagaagatcattctaggtaagtgtttcacaaatagaggtgattttgtcctgcagaggacgtttgacaatgtacggagacctttttcgttgtcacaaataaggaaaggatgtactactggcctcttgtgaagagtgacgcaagaggaatgcaccatgcagccatccacaaccaagaattactcatttcaaagtgtcaatagtgtttatgtttagaaaccttgttctatgtaatccaacattcaaataatagatgttaaaaataaaacagaagagaggcaactgtggagagaaaattatcaaagaagtgacaacatcagttttcttagaactgaagaaaatgagtgtccaggtttaaagggcttactaaatgcccagcacagcaaatgagctaaaaatctacaccaaggctcatcatcataaatttttacaaaaacaaggacaaagagaagttcacagatcagaaatcagaatggctttggacttttcagcaatagccatggaaaatagcagaaaggaacacttcctttaaacttctaggaataattaactttggctttgatttcatatcctatatgaaattatgttcacaaattctgtgatgctcttctattcaagagttacagctaaatgtccctgtcattgagtgtggactagattcagtgactcttttgtgatgatatgtcatttccaagtgtaggttgtagaaagactgtggtttatgtcttgtgttctccatccacgcctatctctctctgtgtctctctttctctctctctctctctctctctctctctcatgcattgcttcttctgtgggaacacatgtcatgagcagccctatggagatgcacgtatgctgagaaactaaggcctcctgcaaagagccacaagaatgagcttagaagtgcatcatttaacaccagacaaatctcgagaggctgcaagcatagacaacagcttaactacaacctcataaaataagctatgccagtcccaccctgctaagccactctcagattcttgaccttcagaaactgccaaataataaacatttttgtttttaagctgctaaattttggaatgacttgttattcaacaatatataaattgtacaccctgataaactataaattgtgcggagaaaataattttcagagatagccttatgtactcccctaaaccttttttccccagaaatctattttcaaaaatatactctaccaagtgaagaaagaaaccaagaaagacaaagaatgtttagttgtgattggagatcagaaggagagtgttttaggcatgattcgccttgttatgctgcaataataagcaattccaaaatattagtggctagaaacacaaaggttgattttgtatctttgcaacatatccaacacaagtcagtcaagggttctgatcattgtagtcactcaggaatctaagctgattcagtctctagtattctatcattctaccgtaacaataagaagctttagcgttcaccatgtcagtcaaaaatgcgtggaaaattttaaactgactcttacatgcctctatgtaggagtgatatatgtcattttcatttcacttcatcatccaaaggaagtcacgtggtcatgcctaactctgaggggacaggggattataatcactaatatttttaagagaggtaagagaattaggaaaatattggagcattagtattacctgcaaagcctaggatccggaaaacagagaacccaacgtgggaggaagatgcaaagtggtgccagaaagatggtggaggagatcctgtaacaacagctgtataacagttgtagagagaaacctgtacagattggagaagaaaatagtgctccaggaattttgttaccaagaaaaaaaaaatctaatgtattcgaatgtattgagaggtggtattcttattgtgtaagagtataatatatgacatgtatgacagacagaagtaccatttaaaattttattaaacataagaattagatccctatctcacactgtacataaacataaaaatggtaaattgatggattgcctaaacatgaaaggcaaagcattaaaatatataaaaatattttggggcatgtagggcaaaagaggtgtcccttaagcaacagcacaaagcaaaaattgtaaagaaaaagacatatatttgatcattttaattaaaaacctgtacaatgcaaagacttcataaacaaagaaaagacataggctcagatagtatatttgcaatactaaaacaataaaggatttatgtcataatttaagaaaaatatttacctatcaatagaacaaaataaaaataacctaacaggaaaatatttttaaagtttaaaaaataatagacagttcacagaacatctgtatgtcaaatacacttatgaatagatgctaactctcatttattattggaaaaattacttcatattagtcggttttcatgctgctgataaagacatacatgagactgggtcatttatacaggaaaaaggatttaatggacttacagttccacacagctggggaggcctcacaatcttggcagaaggcaaggaggagcaagtcacatcttacatgaatggcagaaggcaaagaaagtcccctttataaaaccatcagatctcatgagactaatttactatcacgagaacagcatgggaaggacctgcccccatgattcaattacctcccacgaggtccttcccacaacatgtaggaattcaagatgagatttgggtggggacactgccaaaccatatcgtactaagtgagataacgtactcccatcggactggaacaagtaaaaaataaaataagattgtgaaaggtcacaaactctcattcttgtagaaatttaagttggtacaaccaatttagagtgtaatttagcaataatctagttaaactgaggatggcatgtcctaccaaacagcattccagttaatcacattgaagatagcatgattgttctcaggcttccatattttctgttgaacggtaagttgtcagtctaattggcattcctttaaaatagacttgtttcctcttgatgattttcacattgtaattttgtctgattttcagcacttcaccggtctttaaatgattatgtaagattttcattgctgaggaggaaatcctatcacctcaaatactatcttattagttatattttcattttattttaccatgattttaaatgaattccttaaaaaattaggttagagaactaataaatgataaagagaaaaattattcttcatcctgatagctgttatgtgagggtggaatggtatggctggtttttttcactgtcattttgtaacttggaaattcttattttttaatacaatgacaatattttcatagttaaaaaacactaaaactaaaacaatagtctgttaatgacaaatttaagggcgatttcattaagttaaaaatccatgttaaggcattataagatgaataaatactccaaatgaaaacaaagtgaaggccacttttatttaccttttgtacatgatacttatttttcaacagttgtcatgttagaaaaagttgaaaaaataaaacaagatacacccccttttggcctctaaccttccaaaattgtaatgggtagacttcaaattaaatatctaattcgactcctttccacttctaccctcatagcattagagacatttggaaaaatgaaaaaaatatagtattttatggcagggtacctcaaccccagagccacagacccgtaccaatccgttgcctgttagggacccgattcgcaaagcagtaggtgagcagcagcgggctagggaaggaagcttcatctgtatttacagctgctcctcatcactccatttctgcctgagctccacctcctgtcagatcagcagccacattaaattcccataggagcacaaaccctattgtgaactactcatgcaagggatctaggttgcatgctccttatgagaatctaatgctgcatgatctgtcactgtctcccatcaccccccagatgggaccatctagctgcaggaaaggaagctcaaggctcccactgaatctacattatggtgagttgtataattatttcattatatattataatgtgataataatataaataatgtgtgcaataactgtaatgcacttgaatcatatggaaaccatcctccaacccggtccacggaaaaattgtcttccacaaaatcagttcctggtgccaaaagggtcagggaccactgttttatgggataagtgaaagctggatttgaatccaactctaccttttacttcccatgtgaacattaaaagatgacttaatgtctctgaatctttttttccttctaagtaataactaccttgcagagttattacttgaattggccataaggtaaagaggacaccaaatacagtaaataataacataataataaagaaaccttatgaattctattcagtgatatccatattgaggtatttaaggtgaatgatactgatgtcagcagtttacctggatatgcatcaaaaatatgattgattgatggatggatcggaggaaggaaaagatatgtgatcaaaacgagtatagtaaaatgttcatggtggaatctagatatatagatatcacttgtaatttttaaaaatgttattgcatttttgaaatttgttatgttaaaatattgggtgaaaattctgatgccctggccatgtcccaaatcagttgaatcagatctctggtgtattttttttttaagatccttggatgactccattgtacagcaagtttgcaaaccactattctaacttctcaccacccccttctttatagcttacaaaattatatttttaaatgtcaaatgtcacaatttcactttccttcttcaagaactgattagacttctagcttctcctatgctctcatcttgcataacgttcatttgcacgtggttaaaactgataggcaataaataataacccatctgtcttttcctgacccaacataactaaaaccttcctttcaaggcgaaaatgaactataatctcacagacaagagtagctatagacaactaattctttctggtctctcgtggtcatgggactattcaccactgccgtccctgctgtctatttggtggaccagccagttttactgtgacccataccatggctcttgagaagcatgaagctgccgaaatcgcagttgtagggttaatggaaaacatggtgaagtatagcttacatatatatacaattttggcacaaaatgaagcctaagaaattgtaccgggctgggtgtggtgactcatgcctgtaatcccagcactttgagagaccaaggtgggcggatcacctgaggtcgggagttcgagaccagactgagcaacatggagaaaccctctctacttaaaatacaaaattagccaggcatggtggcgcatgcctgtaaccccagctactcaggaggctaaggcaagagaatctcttccaccctggaggcataggttgtggtgagagaagatcacaccattgcactccagctggggcaacaagagcgaagctccgtctcaataaataaataaataaataaataaataaataaataaataaataaataaaagaaaaagaaattgtaccaggaagtggattgggaatgctctatatattctccccctccaagaagtttttttaatttattgtattgtgaaagatctgcagctatttattttgtgtggtactcttttgcaataaactacttctgcataaatgaactcaaaaactttgatattcatgaaccttcataatgttgatctagtacatcttgcccaactagcccttgggccattccttccatgccactggttgaaaaatatgctccccaccccagtaacatcagcatcagacctctgcaaccagaaagattccataggtaatgaaatccaaatgctggcatttggaagtcaaaccagtgtattttgaaatggaaaggcaaggggaagtgcatggagcaagtacagcatgtgctacaacttcagttcataccctccttaaaatactgtgcaactaaactgtcaattgcccattgatagagatagtatctttttcagctttacaccttccgaattcaacacactgctagcctcaggactaagcgctcaataaatgtttatcaaaagattgagtaaatgaatcagtggtgaaataaaatgtacaaacacatacgcttcatacacgtttaggaagcatttctagtgagctttgtggatattttatttcttaaaggttctttttctttccatgttcatgttattctttattttttaaaatgttgcttctgcttatttctctttctacggcagctatatttacttgcctgagagcacagcatatactgatgttaatcaaactttagatgaaacacctaaaatgatagaaaagaatctgctctaattaaataataaagcaacccctacaggtttagacatgtgccttccggtgtgggaaagaaaaaatttaatgaatgtagtagttttatgccaagaacatttccctcgtgcacctgtgttttaataagatagaatataaaatagcaaaaggggcccgacttttgtgatgatatttactcataaggtagtaagtcagatgtgatgacattttctttgacttagagctgctatacttgggtcagatttcagttcagtaaatttgcagtgaagttgtctttctaacatggtgtcatcctggaactgccctgctcccacagttacatacaggctagggagtgggtaggagtgggggtgaaatcctcttaatgtttatggtgtcagtagattcaaactaaaattagccttacagccatactcctaataaggggcccctggcatatttaattgatttaacaaatttatcaaaaatagataaactgaaatctgccttgaaattaattactgtatctctatttttataagaaaatattttggacccgttccctctgccttatgggtgcaactcccggcagaataggtcatgtctcctgaaaatagttcttattttctttactacttatgacctcttatagcctagaagtttttccttgctatttctagttgaaatgctaatctggcataatttctagttgaaatgctaatctggcataatttcagaactaattttctgttaatgccacttggaacatctaaattcctcctttttcaataatactatatttgtgtgttgcaaacacacacaaatcatactatatttgtgtgtatatatagtaaattccaacttataaaagtaaaattggaatttttttctttctttggaaaattattttataattgagaattataaatgtcacttttttaaatgctgcaacctttgagattggtttcaataaagtaaaacttagtaaacattaagaaaaatgatagcttgatatgttcactaatatggtaaatgaaaacttttatgtgtgtataggctcttgttaattataactaccttcacaggaaaaacagtcttgtggaaggtaatggtgccagtgagagaaaatagagaaagtagaatagtagtaagagagaaaatagaatttcccgtttagaataaagctaagtaaaaagtgaattgtttcagttttatttatgtatttgtaagtgtggtctcatgccatatatattcaaagatagacagagatcttaatctttaattttttatggccaaagaaaatgagtcccatgtaaaagggacattttcgtaagctgatctcaagtggtgtattttgatttgccgcagcagcctatggaagaaatatcattttggctgcctaagaagaaaaatgtcatacctttctattttttattcatactccgcatatttggaattcgtattctcaccatacttttgggaagataacacgaaattgccttacttgcctcgaaatcaaaatctgccattcgttttaaaataaaatggctttttcatctcattttcctttagcagaaaaaagtaagttaaatttttttgtagctgtgttaagtgtactgttcctccctcgttgagaacgaaacaaagacatatgattccatttactgtaattgttttggtttgcccaattacaatagcagtaaaatcatttacacatagtaaaatgtttgagccttaaagggcaagaagactaaatttagctgaagatatacaactttcatgtgccaatgaggaaatgtataaaatcagttatacatattttcctcattcatagatattgaaaatattcatatatgtgtacatgtatttgataacttaatattttctaaataacagaaattatatactgtatatatatttggatattatgattattgttattgccaccattgagcacttactatgggctcagaaaacttcactgtattatttttaattcttataacaaccctgtgaaatatatattatgcctatttcacaaatgagaactctgaaatcaggaaattaaatcacttgctgaagtttacaaagcactgttaggcaataaaacagaatttcaaactcacgtttgcttgtcttcaaattttgtatgctgtacaacctgattgttttactacttgttcttaatttcaaaaaaaatcttcatactaaaagatgatactttgggagttctaaagaacatgtttttggccgggcgcggtggctcacgcctgtaatcccagcactttgggaggccgaggcagaaggatcacgaggtcaggagatcgagaccgtcctggccaacaaggtgaaaccccgtctctactaaaaaatacaaaaaattagccgggcgtggtggcgggcgcctgtagtcccagctactcgggaagctgaggcgggagaaaggcgtgaacctgggaggcagagcttgtagtgagccgagatcgcgccgctgcactccagcctggttgacagagcgagactccgtctcaaaaataacaaaacaaaacaaaacaaaacaaaaaaaaccatgtttcttttcagaaggtatactcatttgaagtggataccaattatttgtattaaaattacttatggataaatttgaatctgcaaaaattaagtgcaacattattttttggcacctgttataggaggtaaaaatggtgattcaatatagtttctacccttagggagcatttagtgtggtttagacgtaatgacactaatgtaaattagagtagaataaattctttaaagcaggacaaaaggagtgttaaagactacaaagtttcagttatggaagataaaattctggagatctattatacagcatagtgcctatagctaataatgctgtttcggacacttaaaatttcctaagaaatcttatgttgtgttcttaccaccagtaacaacaataataaaggggacaagaggaaattttgagtgatgacagatatgtttatagccttcatggtggcgatggttttgtgggtgtatacttattcccaaactctttgattttatatatatatatatatatatatatatatatatatatatatatatgatgaaactctttgagatatatatatatatatgtaaaatatgtacagctttttgtatgtcaatcatacttcattaaggtggttacaaaaaagaatcaagaaaaataatcaccctaataaaaagagtgttattaaagaggggagggattacttctaattggtagtatcagaaaggttctcatggaggaaggtatagaaaaatttaggacaatataagcaacgatactttaagaaaaggaataatataaacaaaaataaaccaaaagatgaagaaccaccaaggatgtttctgaaaaatcaagagaaattccattttgatttgagagtatgaggtacttgtcatgatatataatgagaagtgtctagaaatatgttattttgagcaaatgctgcttagaaaggaggttaggttatttattaatccattcctttgaaatataaatttcatgatcagaaacacgtgagtgtaactatccaataacaacatgatttatttccaagaggatagtatattataggagaagtaggattttttctctttcacaagctaatacagtgtttactgattcaaatgacacttaaaaaaaacaagaaacaaaaaacatacactataagctatccttattcagctatgttattgtcttgcattcctgattagaaacatacaagttagactcccaaagtctcagttttctcatttgcaaaatgaataaaatgatagtacctaccccaaggtgctgtggagtatatttaatcatgtacttaatctgaagttttaattagagtgcatagcatatatttgtggttgcttttgctcctatttctgggtaaaagttcctacacctattatatatgttttgtgtttgaatgaagagaaaggcatcattatttcaaatatcccctctagccaacaaatgaaagctaagacttggaagctaggatgtctaacaccatatcctcttcatgtggactatatagtagaggatatgtaaattaagactcaattaaatgctcacattttataaaggagacccttgaatatatcaaatcctcagagagtatgtcagtttaaacttattaagaaatttaaattatttaacttagcctgctgagtcagtttctgtagctgatttctccaaaaggtcttggtattaaaagtagcattacagatcactaatagcaaactatttctgctactttgggtatttttacagggtgctaattgtgccaaatcaagacattgaaattgcataattttaggttaatattagcataatcctacatattttttcagaagcagtgcaggaatagtacaccctgaatatttttccatcatgatggaattttcaaatatcacaacctttacattgtcagttgtctgctggaacattatattgtgtcaaagagatttataaaagagaagggcaaagaaaatttgcggagttctagacaatagtaatatcagggacacttttgctttctttgttattactaaggagttaaataatcagataccaagcataggtaaagaaatgaatctctaactatttgagtacttatcaatttatctcaaggatatttacggtgttttcccctaagccaaaatagagtgcttaattaaggtccccttagccccctaaaaatcactcaggccaagtttctgatatgtgtgtatacttatatacatattaaagtatatgtatttttgtgtgcactttcagatcaaaaagtcctcgtttatctaaagcaatttcagcttattgatgaggcttttctgttacagcgtcctcctccacagatctgcctgtctagagatttaagcccaataagagtccagcaaagtttaaacaacactttagaaatctaaagaattttaagatttattttaatagtcttagtgataacctgaattgtttgtgagttcttacaaataatgcaatcaacatttaagtaattttattatttttttgtttgtataaatttaaggtatacaagtacatttttgttacatggatatattgcagagtggcgaagtctggttttttgtgtacccatcatgcaaatgatgtaccttttctccattaagcaatttcctatccttcgcccccatcccaccctctcgcccttctgagtctccagtgtctattattccacactctgtgcgcatgtgtacacattatttagcttccacttgtaagtgagaacatgcaatatttgactttctgtttttgagttattccacttaagatgaccaccagttccatccatgttgctgcaaaagacatgatttcattctttactatggctttgtagtatttttcattgtgtatatgaaattgtttattccatacgcaatttgtgtgtgtgtacatatatatatatatatatatatatatatatatatatatatatatatatgcttagacttagaagctaggatagacacacaatggaatactacacaatggaatacattcattcacacacatataaataaaagaatatgtggagatatatctccacatattctttatccaatcatctgtttttaaataatgctattgacttctttagggtgaattttatcaatattgttttggtttaaaacactcaccttaaaagagtcacagtccctaaatgtgcatcctcatatttaaattaggtctcagtaaatttgtgcaaagtgtattctttttaggatggtgttgaacttgctaaattatttatctttaagaatcatcattttgtgtcttttattaatgaaaacaacaattatgtgattgctgatatatttggaaaatgatttctgatgtagattgatttttttattctaaattctgtgtcggtattaaaaatttatagattactaactgtattaatatcgataatactaaattttattgctatttataacttggagtgtactttcatcctcctgaaaaagctgaatgaggtaggcagtattattctgggtttatgtgtgagataactgagactcagaggtaaaatagtgtatccaagcattcatggctcttaaatggaagatataaggggtttgtgaaattactcatggacttttttattcattcattcagttattaaaatgtattcaacatttatcatgtaccaggaacagcgcttagtaccaggaattcaaaggtgcataaaacatcttccttattctaagaggtacatagtgtactggaacaaacagccttgtaaatacataattagaacatgaagtagtatgttaatagaggttttcacaaagctgtggaagcttgtcttatgaagtaactaattccaagggagagaagccttatggaatagtgacattttagatagggtgtcattctaaaatacagcaaaaggcccacagtaaaaaaggaattttggttgttatgaaaattttcagattttctatgttttcagtacagtatacatggtgggctatgtgaatgtttgtatagggaccaaagtaggaagtgaggttgtctgttagagagcgctgagaaaccgaaaatagggagagatgagttggaatatgctgaggaaaagttattaggagttttcaagaaaggccacgacagtggggctagagagaagaggctaaattaaagagtcatttctggtttagaattgataaaatatagagacaagcatgataagaaagaagtcgagaagtaaacgatggtctcaagatttctagcttggaaatcattgactaaaattaaaactaaggactggattaggccattcttgcattgctataaagaaatacctgagactgggtgtttataaagtaaagaggtttaattggctgacgattctgcaggctctacaggaagcatagcaacatctgtttctggggaggcctcagggagcttttactcatggtggaaggcagagcaggtgtaggcatttcacatggcgaaagcagagagagagagttggtggtgggggtgggtggctacctacttttaaacaaccagatcttggagaactcactcattttcatgaggacagtaccaagaggatggtattaaaccgtgagaaaccaccctgatgatccagtcacctctcaccaggccccacctccaacattggggattacaatttaatatgagatttgggtggggacacagatccaaatcatatcaaagacttgcatgggaaaataaggaattgttgacataacatctttgaggttcacatcaaatgttctgatgaggatagtccaagtagcagttggctatatacctcagataagggctgaaatttggagctatgtcataatcagcctagattaagagtcaataatctcctgcccatgggccaattacacccaccacttgtttttgtaaagtagtattgaatcccagccatatccatttgcttatgctccatgtataccttttttttgaacttcaaggcagagttgagtagttgtaacaaaaaccatacggcccacaaagcctgaaatatttgttctcaagatctttatctataaagtttgccaatacctgctgtagatgttagttgaagctttgaaagcaaatgaggtttcataaggcagtgtccatacaagacatttaacaagtttacctataaaaactagaattcctttgaggggaacacatcctagtctccattaagcacagtagaagagtcccctataatgggaaagaggtcactttaggtgttgatgttggtggtacaggtcaaagaaaatttatctttgctgtttattcagaatgcaataagtgaagttatgagaaataagggaaaaaatgtgtagaatttcaacagcgaagagaggggataaaggcatgagaatgagttcctaagctcaagtattataaacactgtgagaaacttaaaatcaaagtatgactccaaacgtatttgaagcctgagaacaaggctcacaacctagggaggattagggatcaataaaatagagtgttacaaagtataatgtcaatccagagttgtaaaaatatcagcattgaatatattgaaagcagtaaaactgaatgaggagactatcattttatatcactgtgtttatttctttgccttgttctataaatatttaaaattataaaatttttattaacagtgagagcagaactaccagagtgagcagatcaaaattgggacagatgcttttcactgcacacacttttatttttctgctgttcatgcattatcttgtacagtgcacatgttttacctaaaaaattaaaatggagtctcctgcttaggaaaaaagtatatattctgtttcaaactatatacaaaaataaaatcccaggtgactaaaaactgacatgagaaaaaaacaaattgataaagcttttacagtaaaatagaggagaatatgttaattaatatagggtaagaaaaaattgcttacacaaatgatgaagcactaatcatgaataaaaataataaagtggactaccttgtatattaataacatctatacatcaaaagacagcactgagagagtaaaaatgaaacccacagagtaggataaattatttggaatacacacataatggatgaaatgtgtgtattcataattataaagaattcctacaaatctttcagaaaagaacagataatccaatagaaaaatgggaaaagttcttgaaaagtgaaccatggcacaaaaagggcttgtggcctgctggcaatattctgtatcttgacctggatggcatttttaaggtgatcactttatagtaaataactaatgtgttttatgcatcatagtaacgttaagatttttgtcatctttacaaaataagaaatccaaacggccaataaatatataaagaatttctaagtcccattaatggtccaggccatgcaaattaaaactaaaatgaaatatcactgcttaccaaccagaatcattgaaatttataagtctgacaattccatgtggtggtgagaatatacagcaattagaaatttcacacaatgttacttggtctgtgaattgtaaatagaagtgtaaaattacactactgcttcttggagtgaaatccatttggcactatttagtaaattcaaagatctgcataacctatagcccaccaatttcacttctatatatacactctacagaaatgcatatgttcatattccaggagacatgtttgggaatgtcatagcagcatagtaatagccccaaaccaaaactacttcagtatttattaatagtaaaatttgctatagtttgaatgtgtctctttccaaattcaggtgtcgataatgtgctagtactaagaggtagggtgtttaagtggtgattaggccatgagggctccttctttgttaataaaaataagacccttataaacaaggcttcacgcagcattcagtcagcttgctctcttgcccttctaccttctgccttgtgaagatacagcaggaaggccctcaccagacaccaaatgccagagcctttatcttggacttcccagcctccagaactgtgagtgaatacattggtattatttgtaaattacccagtctcaggcattttgttataacagcacaaacagactaagacaatcatacagtgagaaattaatcaacaactaataagcaaagaggtagattaatcttgaaactatgatatagagtgttccatttggctgctggaagttttatttcttggtctgggtgatggtcaccatgggtttatatgaatggttccctatattatgtttcacaacaaaaagcatttaaaaagtaaatatatgtaatgtactcagggataggcatggccaaccatggattctatgctgaaataatgattcagatttcatcagcaggctaatgacactgcctatttaaatactttaagtcctgaaattaaagaaggtaatttctcaagaaggaatttctaatttatgggtgggtctattccccaccagagagacactagcatggctcagattctatgttggtcattttatttgcatttaaagtcttaagccaaatagaggtacactaataatgacaacaactactactactcatacttgtggaacactgccagatgctgttttaagaaatttgcattttcatttgtaactgagcttacttgaatcttctctctttttttcttggttaatctaactactggtctatcaattttacttatcttttcaaagaatcaacattttgtttcattgatcttttatatttttgtttcaatttcatttagttctgctctgatctttgttatttcttttcttctggagctttgtgttggctttgttgttgattctctagttccttcaggtgtgatgttaggtagtcagactgtgaactttcaggctctttgatgtaggcatttggtgctagaaaatttcctcttagccttgcttttgctgtatcccagaggttttgaatagattttgttgtgaatgtgatgaaaacggaacatttgtacactgctggtgattgtaaattagtacaacctacatggaaaacagtatgaagatttcttaaagaactaaaagtagatctaacatttgatctggaaatctcactaccgattatgtacctagaggaagagaattcattatatcaaaaagacacttgcacgcatatgtttatagcagcacaattcacagttgcaaagatatggaaccatcctaagtgccagccgaccaatgagtggataaagaaaatgtggcatatattttcatataccgtgaaatactattcagccacataccatgcaatactactcagccgtagaaaataatgaaataatgtcttttgcagcaactttgatggagctggatgccattattctaagtgaagtaattcaggaatggaaaaccaaatactgtatgttctcacttataagtgggagctacgctgtaggtacacaaaggcagacagagtggtagaatggactttgaagactcagaaggggcagagtgggaaggtagtgagggataaaaaattacctttggggtgtaatgtacactacttgggtgacacgtgcactaaaatatctgattttacttctatacaattcattcatgtaaccaaaaatcacttgtattccaaagactattgaatttgaattttttaaaaacattaataaaataaaagatgtaaaaaaagaaatttatatatactcatttattgagctcccacaattaaccttaggaggtaagtacttcataattggtagtatacttatcttttactaaatatttgtattacttgggaagttgagggttggggagaagtagcaaggtactatgatttggggcagataactaacttatttattcgcacatacagtttggaccatgagacacgagctcaggtccctcctcctcacctaatcaaagatgaaatatgtgggatgggatgaaataatcagcagtccaatgctgagtttccagaccgaagtataaagcaacaatggatatgtcagaagtctactagggtgttatttatttaaatctatttcatggaatttactaccaccttaatggcccgaaagtgttaaagtatgccccagagtaccgaattactccctaaatgtaatttatgcttgagaataatctgactaacttgatttagaacatcagaaaataagttatgctgcacataaatgaagcagcagtgtaattttaaataccggttgcacggtgaatgagaattttaatatttgcaaaattctaaaatcacttgatttattatccttatgtttatactgacatttttttgccctttgttaagttccatccatatttcttcttactgccaagaaaaaaaactttttttcctagaaatattacagaaggcaaaaattatatttgtttccctgaatgctatttttgatgtctctacttgtttctcattgttaccatttgcttcattcatgggcagcccaattaatggagcgagacaaatttagggagcacagtgactaattagatattaaattggtaaatctaactttgtaaaaccagaaaaaatatatatatatttttttcatttggaattttccttggtggaaaagagtttaaaagtagtcatgataaaaaatgtaattttacgtagtaaattcaagaatagatttagactgtgctattaacagcacctattaaatactgaaaagtgtattttaaaattttatgtgaggcttgaaatggagtctaaagtattattactcacattaagtgtcatcacatgtaaagcccatgattttattctttaatattttgtttgaatagttacttatttcaacagtaatttcaataataaaattaaatcaactttacagttttcaaaggtttagcagttgcatgctgtaataaatacttcatatttatatatttataaagtgacagcataagtcatttttattaggtccttgaggatgcaaaagtttggattatacgaggagacgagagaaaaagggaagaagggcatttcagaaatatgctaccgatatgcaaattcacaagtcctaagacagtagcaggggtcgggcagaaagtccatcctgcctccctcttgtgggcctggaacaatggtgtaagtggaaggcctgttccccttctcttcctacctccagctctgtcttacagagctacggataccatgagcaagtgtatgaacccttacggttttcttctcttgggagaatgtaaaggaaagataacttgtagaaacttgtagataacttgtaaaaaggaaaagaattcagggtgagagggggatttgttgaatttgatagaggatggcaattaccaatatgatgagtgattgagaaacaagtctgtgcaacaggtttgaaatcgaaaatctttgaggtgtacaggatcctgaaatgaagaatgggcatttatagcagtatgtcagagaaacagtcacctcctagtagctaaaagtgttggcaaaagtatagttcaagtgattgggtaggaaaaacagcaaaccaagagtggagactgatggttgctacaaaggtggagtggtaagtcgtgaccaactggtacttctctgtgctctggttagctgctgactgtttctcagactgtggtagcaggaggagggttggagttagcagtcatttgcatatgagactgccatttaaaaaaaaattttaaattatttcatttttctgactctcaatatgaaaagcacattgtagacaaattgaaaaatatagaaaaattatataagaaaatatagtctcaccagtatggaacaatgctaactatgttgcatagatttttagattctcattcaaaagcaactctttgactccagtgatgcaaatgcatgtaacatatgcaatgtgcaattcatttttaaagggaataaacttacgatatattcataggtcatttattgtgtgttatataccattgaaaatatatgaatgctaaattattagtaaacatgcaaaaacattggcaagatcattttgttgtggaaggatatattgtatctgaataactctagaataccataaatcatcaaaggcaacattcttatttttcactaactacagttagagaatacctcttcggctaccttcggttgccttttttatgctaccaaaatgctgtctgttttacaagattttaaaggttaagcatataattattcattaaatacaatgagtgcaatgtacatgtagatacattattaaattttgggtagttaataaaaataaggggaaaaaacctctagaactatcacttttaattgtttaactgataaagtgaagcttcatcttggaaaaataatttcacaagagagcatgtgcactggtagaaaagtgccattgaaacaagagatatttgggttagaagcctctctctactatttaataccattttcaccttttggcaaattacttggcctctgttttctccaatggaaaatgggaataataattgttatgctgcagggttattgtaggtgtcaatgaaatgatgtgtctggcactataaaagcacagagcccggtgcctggctattagtaactgtttaataaatgttaattcctttctctgcccaggacatcagtaggcagatgtagcaatttaaaacttctagtgttactttaaattcctgaatgaaggtagaggactgaaaagatatcatggtattcaaaagtatgatccattgcttcttaagaatagagttcagaaaagcttgacagattcctgtactctgaggcagcaccatagccggtaatctgtaggatggctattggttttgtgctcacaaatgcttgcttgggcaggccccaggaaatctggtagactgtaagcccagtaagatttcaaatcttactttacggcagtgtttttcaccttgactgtacattgaaatcacctggatgctttgaaaaataacagcgtcagtgtccaacctccagaaatactgattaagttggtctggaatggagccccaggatcactgtttggttattgttgttgctgtgttttaaatgccccagttgattcttatgtgcaactgtcttaggtaaacatacagccctggttcatattatttctgcctcagtctcttttatgactggaaggtgaccaaatgcttgtttcctaatattctttccatgtgtagtattaacacatttgacttgtactaagttcctgcagtattccaatctaaaattttagtgactacaataaaataagaaggattaaagaaggcatcgcatagtttagtatatcggttatttaatgcttacatgtgagcctacaatatgaattatatctgtcatcttattttaaatattgacagaatctttaatgatagtgacgaattattgatttattggtgtgataatggtattttagttatatttttaaagttttatttgtaataactatatgtatttatggggtacagtgtgacgtttcagtgtaatgtttcattgtgtaatgatcaaatcaggtttcttggcagatccatagcctcaaacatttataatttctctgtggtgagaaaatttaaaattctctttcactattttgaaatatacagcacaatattggtaactttgttcatattactatgcaatagaacactagaacttattactcctttcagttgatgaacaggcagttttggatcaagaataatattgaaagtgatagaatttatgaagtaatttttatccaaaaatattttgaaagggaatatattgcttccaaataatttattacaatgttaagatatttgtaaatttctagaattaaaaaaatatatttttaggaaagaaaatgccaatagtccaaaatagttgctttatctttcttttaatcaataaatatattcattttaaagggaaaaattgcaaccttccatttaaaatcagcttttatattgagtatttttttaaaatgttgtgtgtacatgctaggtgtgtatattaatttttatttgttacttgaaactaaactctgcaaatgcaggaaactatcagagtgatatctttgtcagtataaccaaaaaatatacgctatatctctataatctgttttacataatccatctatttttcttgatccatatgcttttacctgcaggcgatttgacagatctgttgagaaatggcggcgttttcattatgatataaagatatttaatcagtggctaacagaagctgaacagtttctcagaaagacacaaattcctgagaattgggaacatgctaaatacaaatggtatcttaaggtaagtctttgatttgttttttcgaaattgtatttatcttcagcacatctggactctttaacttcttaaagatcaggttctgaagggtgatggaaattacttttgactgttgttgtcatcattatattactagaaagaaaattatcataatgataatattagagcacggtgctatggactttttgtgtcaggatgagagagtttgcctggacggagctggtttatctgataaactgcaaaatataattgaatctgtgacagagggaagcatcgtaacagcaaggtgttttgtggctttggggcagtgtgtatttcggctttatgttggaacctttccagaaggagaacttgtggcatacttagctaaaatgaagttgctagaaatatccatcatgataaaattacagttctgttttcctaaagacaattttgtagtgctgtagcaatatttctatatattctattgacaaaatgccttctgaaatagtccagaggccaaaacaatgcagagttaattgttggtacttattgacattttatggtttatgttaatagggaaacagcatatggatgataaccagtgtgtagtttaatttcaacttgtggtgtcctttgaatatgcaggtaaagatagattagattgtccaggatataatttggttgctaaattacatagtttaggcataagaaacactgtgtttattacacgaagacttaattatttttgcatcttttttagctcaaattgttcatgttgcaatagtcaatcaagtggatttgaattgtagccaatttttaatgccagaaaatactgattaagacagatgagggcaaaaaacacccagtagtttattaaatactttagatatttcaaaatgctggattcacaaaagcagtatcacatttgactttacaagtcttcattctcaaatatgtttccatagtaaatatgccctttaatattaaggagttaagcatttaaacacctatttatatgataagctatttaaacacagaaaatatttttaaaaccttgtgtaattatatgtgtatcaatcaaacttgcatgcacaccagcgttggcatttgtatagagaggaaatgtatggattcccaatctgctttaatatagaagatacattttaaaaatagcactgaagtgaattttgggctaatgtagcataatggggtttctgcctgagaggcagaaacatattagagttatataaaatgttttggggtagatatagaaaccacttgccattttcaatgatatccaacccaaggtagttatatatttcaatttatattttattatcaaattagtacttattgtgaaaaaaatcaagtaacatagaaatttgtaaaagtacctccattctactctttggaggatagttgttcagtatgaattttgctacatatttcaggctgggtttcttggaaagccattgtaaaatggagatttgtatgtagaaggttaactagggagtacttttacgatgaagcaatttgttttgatgtaacttggtgtagttttcttcatgtttcttgttcttgaagtcagttaagctcttgaatctgtgcatttaacatttcatcaaatttagaaacctttcaaccatttttttaaaaaaaatggaactccaattgtacatttattaggctccttaaagtgccccactactcactgatgttatgttcattgtctgtttggtctctcttttctctgtaatttgttttatataatctctattgtcaaattgactaatctttttcaaagtctaatctatggctaatcccatgtagtatatatttttaacatcagacattttcatctcttagaagtaaaagttgggtctttttatttcttccatgtgtctactcaacatgttcagtctttactttcttgactatatggaatacagatataataactgttagaatattcttctctactaattttatcatctgtgtctattctgggttaatttaaattgatttatttttctcctcattaagtgtgttgtttaactgcttctttggatgactggtaatttttgactatatgccagacattgtgaattttaacttagcgcgtgcttgatacttcaaataaattcaaatatattgaaataaatattctcaaacctcgttctggaacacagttaattcacttggaaacaatttgatcttttgagaatcttccttttatgctttgttatgaccagaacagtgtaagtttagggctactttttccccactactgaggcaaaacccttctgagtactctctctgatgtcctgtgaatgataaaatttttcactggggctcgtgggaacaggtggtattactagccacgtgtgagctctggtgattgtttcctttaattcttttgtgaagttctttccttagctttgagtggttttcttgcatacatgaactgatcaagactcagatgaagaataaaataaagctttctacaaatctccaaaatttcctctgtgtatatatcacctctctggtattttgccctgtgatcactagtcagccttgggctgctgaaactctcagcttcatcttttaacaaaagcctcctggcaaggatcactgtccttcaatgtctgatgttcaatgtgttgaaaaccgttgtagcatatattttgtctttttttttttttttttttttttaagtgtttcaggtgtttcaggcaggagattaagttcagcctcctttactccaacttgaaaacaagtccaaaacaaactattttgatgtaatttgatcttttaatacattaacattacacaattttgtgaatatatcataatttaaaattttcagagaatgtctaatggtcctcatttcttgacagtgtggtttagttgaaactgatgaacattttatcaaaacttttcccctcaattggatacttttttttttttgagatggaattttgcttttgtcacccaggctggagtggcatgatctcagctcactgcaacctctgcctccaggcttcaagcaattctcctgccttagcctcccgagtagctgggattacaggtgcccacccccacacctggctaatttttgtatttttagtagagacgagatttcaccatgttggtcaggctggtctagatctccgacctcaggtggtctgcctgtctcagcctcccaaagtgctgggattgcagacgtgagccaccatgcctggccaactggataattttaaaaagaccattttatttagtctattttttctcaatctatagatgagataagaaaaatcattctagatgtccaaggaaaaattctttcagaaaagagctgtgaatgatatcacaaaccccccaaacagttaaggtatttctttcctggttattttatgtccaaaatcatgcatatgaacatgtgcacacacatgagcgtgcacacacacatgaatacatatacacgcacataatgtaccttaggttatctttccattctgagtaattatcgtaaaatgggtaaaatcaaccccgtaagataccttcatcgataaggcaaatcaaagctttggtaatttctgctatcttggcctttgttgattgactaataatgaataagagaatgagtttcaatatttactatgaaattattttagaagacaggatgtagacagtggctgttagcaggcaattgtttggcatgagccagtaatggttactgtgaaaaaaatcaaccaagcagcccatatattaaacaaacacacgcagaagcacgttggagtctgaagcctcatatgtacaattttcagtaaagaaataacttttagatatgaaataaacaaatagatatatgttgtaaacttgtccctatgtattttgatcaaattgcatcatatttttttcactttaaagaagagaatttagtgctttaactgagacttagtgttatcattcaaaatatactgactgccaatagcagtagaaagataatctggttccatgcaactctattttttttcctctgtcgcaagtaaaagacaaaattaagtacatgaattagtgctttttgaagatattccagagcaatataccatgccactatggagaacctctctaaaaatatcccatttttttacctgagaaaaatattgatcatgttatatgccactcaaattggtttattaaattcgttgaatgatatcagcatctcttaatgcattcactaaacaagcagtaattgagtgcatatacaaagttttatcatccaccaaaacagtgacaatccacatgaggctctaatagaagtttagaaagggggttaagtggttaaatgctggactcagaaagattggattcaaatcccaggtcctttagcttaatagttgtagaatcttgtgaaaatatcttaattcttttcatgtctctgatttctcttctctaaaatggaaatataaatgagatgtgtataaagccacttggaatagcattttgcacaaaataattactcattaaatgtaagcccctattataactaatcactctttataagtgattagttcatatcaatacaaactaagacttatttactgaattatcgtctctaaacatccacactgcagaaaaaccaacctggaaatttcataaaaccttatttttatgtagtataatttcttctcaaagcataagggctcttggattaggaattgaggaaaattccaattcagccaaacgcatctgtttcagatagctgacacttctgcctactcatttcctagctaacaagaagaaatgttaatgggagttttcaaaggaaaagctgaacaccatgaaggaaagtgacacaaataatgttagctcatatattgacagggtgaatttgtgtgctttcaagtcccttcagtgaaaataggaaagtagaaattataaaatgccctaacatttaaagctagcatgttcttggagactaggaaaaaataagttttaaaacatgggctatgatagaatgagatggaaaatgtttgtagttgccagtagaaacaataacaattaccattagattaagtatttaaaccagctgaatatttttattaatggaaatggcatctgttttatgaaataatgctgctgaatgaaccatattaaaaatgaccagtatttcctgcagaacgttgtcgcagacatacaagcctgagaccctaaaatcttaaggtattccatttgaaatcgaccttaagacattaacagtagtggtattgtttagatgaaattttttaggctttaaatcaacaaatgttaagcagacatggggagcgaaacaccagtgtgttattctgacatgaataaactgctgtttttagggaaaaaatatagtcttgttaaggttaagctaattggttttctggtatcttttgcaatgttagtgtgttttactgctccataacctatgttatatggtaaatgtgcaatatatttatatatgttgctgtaaagaaatgtaataaaaaactgtttactttgtgatatgaaagtaaaaatttattcattgtcattgagcatacagaagtaaatatggattacatatgtcatattttaatgttcacatggtcccaccatcaaatgttgaaaaacttatagtttaacgtcatattctattgaagaaaaatacactcccttttctcaaatgtgaaatgtccagagagaatggaaaattacatataaagcatgtagttatagcatggtgaccctgctgtgatctctcagatgaggaacaaaagggagaaagaaagagcacactggtgctttggagttgagagaaggcaaaaaaagagtacaaaaatgtcaaagccaagtttagctgctcttcagctctccctttagctgctcttcagctttaccttaccatggttattagtgattgaagaaaattctaaagcactttttaaaggacccaattctgaagagtttagattcagagagcacaatggagttggagtgactcctgctcaaaagtttgagacaagcgagtccatgaaaagaccgtcctcctcttaatggaaatacccaggttttctcattcttctcgccttgctttcagcactcgcagcccagaaagcccttatctaacaggtactgccgttgaaaggtcattgacttgtacaaaaatgatgagtgctgaatagatgtgcataggtcactgacagtatctgctacagagaatgagttttcgtatttttattaggatacacctaacatggcaatctactgcctcaaagaactctataggaggtaagtgaatttatattaatacagattgaattaaaggataatctagaaaaaggcatatgatgtaaaaaaatcagacacaagtatattttctgtatagtcagtttttacattgtgatttcaccagctggctgctgagtttgacggcttcttaacagccacactgctgagattcaaatgctgatagaaactttgatggaaaaatcactggagtaaatatttctaccatctgttgcccttcactgggaccctaacgttaagaataattcataccattgcttgtcctttatatttccccagcagtaataaaatttcataagattttgttttgtggtcacaaagctatcctggtttctgtaactagaagacatacactagcataagggaatcagccggaaaatttactgctaagagaatttgtctctagtcacttactttaaggttacagcaatgtgtaagtgtgggaatacattttaaaatgagcttttcaaagttattagctggtagtggcatgagagttaagtctcttaatacagttaaacagttgggcacttcatccttgcgtaaatattgttacccttttattgctgcttggaaactcctctgcaactttttggcccctatccatcttttcagaagtagtaaataaccaatttactgggagtgtggtaccaggcagaaattccgagaggggctttcaatccttgcccatcaagtgtatctttcagaaataagtatattaaaataattggataatttcagtggcttgttattagacttccgttgtccagcatggcatgtttaagaagatgacagattttcatacattattggaaagaagcaagaacaaaaaaacataacttactgtagtaaccacggtaaagaactgcttaaaatgcaggataaacatgtcatccctaagggattcccattcttagagcatgaaattatcaagagagtaagagactacaaaaaatgagaagaatgctgattgcaaattccaaatagaaaaaatcaaaacaaaactgcgcaccatcattctggaagcaatgagaagcagaaattgtcatttaatgaaatgtaagattaaagttaatagaagtaattttcatgaaataatattttgcaaggacgatgttccagccatattgatcttcgtgttttcttttcacatcccttcttactgttccctagaatgcttgtttctacctttaaatttgcttttctctctaccagagggctctaccctatctccagtttctcaccatgtcccaatctactccctctcagaatttttgtacacttccctttatatatatttgtgctctaattttatattcacagatatgccttttgtaactcccccatcttaaagaaagcacacacgtacgcacacatgcacacacacaaaattgaactctttctgggagatctgcttaactttcttcataactctgtcacttgctgaaactgtagtatgtgttttcatgtttattatcttttccattagaatgaacatattttgggtacttggtctttctcgatcaccaatatacctcggtacgtagaaaaattgattcatatattgaaaatgtaatattcagtagaacgaataaatacataaataaatttaaaaatgatacttttattgtattacctgagacaaatgatccccaagtttgtccttgcttttcatagccaaaacattctctcttacattgagcttccttcacctcttctgtgtacagagcacttaaaattttcacattgcctgatactttaacaatatgatggccctgttctcttacccattggagcatatgttaaataccagaacccatgtaacaaacatatattgtgatcctactgtgtgcaaagcagatactgcttgctgctaggaatacagagctgactaagagctccttttctctttatgagctcacagtctcatgagttcaacgtcttaaggcacaacgtctaaagcaaagggcagtaagtaaacactccagaaagtactggatctggcctaggacaaatggtgggttgtttttccagctgttatttttcctgccccctaattgacagtcctccattacacctctgggatacctagtctgacttgggaaaacctgactttgggaatcagaggcagtctctcttgcttatatatgaggaactctaatggatacttactgtcattagagaaactctgcttctagcctggctccttttgtaaagaaggttgagtccccttggagagcctgcagaacataaccatttgcatgtaatgaacagtttgtaatactttgagattgatgtgcaatttctatttgacaagggaaaaacaattaggattaaccgtggtcgtatatcccagaataccaacgttgtttccacactctaagtgttgttgggtcattatatgagattcataattttgtcctgttgtacccacgtttgcattaccattcagtcttaatttattataccctattaaaagtttttttggtaatttgttcttattgctactcaggcattaaaatgtctgcaggctgtgaaaatgaataaatttaatgtggcagcatagttctcaaaatcctggctttacaactcatagtacaggcttgtattgtaaatcctagttaacatggatttatttgaaaatccaattttactgctaatcttaaataacacatttttcaaacattttatccttgaatttctatttttttataatttatggctgttgtatgtatttacaaaaggacaatgtgtgtacttttaaatactagtaatggattgctgaaacaactgtaactttaaaacaatgcaattgttaaaaaaataaactgtgcagcctggcttaatggaggcttatgaacatatgattaagatatatgctataataagcaaattcactcaactgatagttcataggaactttcaaatttaatctcataaccagtgctatccttcaaagaatggtcagggcaatttaacgagtacatgaccacgcaagataatttcattgaagagtggctgaactgttgaaatattttctagtctccttgggatatcattaagagcagaaattttgaaatggaattgtaatgatgttcagaaaagataagtaggtaactctcttaatacgttttgtgctgctgtaacaaagtacctaagactaggtaataatttgtaatgaacaaaaatgtattggctcacagttctggagactaggaagtctaacattaaggtgtcagcctctggcgagggcctacttgatatgtcatcacatgatggacgattagagggcaagaaagatcaaaagggggctgaactcccacttttataagggaaccaaacccactcgtgagggtggagccctcaatccttaatcacctcctaaagctcccaccccttaatactgtcacaatggcaattaaatttcaacatcagttttggagggaaaaacattgaaaccatagtagtgatactgactactaccacacagggcttgggaggctaccctagctgttgcacccaagagatgaatcttctaatgtgattacctttatcattttttttactttattaaaatacttttattttacatgtatacttttgtctacccaccatttccatgtctgaccactgctactactatgtcctagcataacattccatacatccttaaaaccaagcaaagggtggagttccatctttaaaaactaaacaggcattttggacaacacattcttggcaatggaatctggacaacatttatcaaacatggtagggaaggttctcactctgcattatcaaaacgacagccagatatcaactgttacagaaacgaaatcagatggaaaatttttaacaaattgtttaaactattttcttagagagacttcctccactgccagagatcttgaatagcctctggtcagtcatctggaagcaattcttcacataattcatgaacttggcttccactttaggaagagaaccacctttttctatacttgcttgcatttttgctttaatgtcttctacagaactaggtcctttgggtgttttaggagtttttccttgttttgaaggattcttgtccttttgatcttggtgttgacggttttgagtcttttccattccgatttgacttttgtgcatttttggctggagtatctcatatagatttcttcactggcgctttttcttcagtttcctcatcatcaaaatcatcatcatcatcaaaatcatcatcttcatcagcagcaagttttacttttttctgtggaaccttgctaccacctccaggagcagatcgctttccagatatacttatgagtttcacatcctcctcctgttcgtcttctgactctgtatcttcctccccagctactaaatgctgtccactcacatgcactggccctgaaccacacttcaaccgtaagaccactgatggtgttatttcaaagccctcaagggaaaccatgggctgtacagacattttcaaagctgccagtgttactttaattggactgcctttgtaactcattgcctctgcttcaacaatgtgcaatttatcctttgccccagcccctaaactgaccgttcttaaagataactgttgctcaatttcattattatccaccttaaagtgatcatctttgtcggcctttagttcacaaccaaaaagatagttttggggcctcagaggactcatgtccatcatcgtccatcaggtggcaggacgcacttaggtgggagagaaggcagatgatgataaaggaccactgctcaagagaacagctgtgcaggacagaatcacaccagggagattacctttatcttagaaaacctgaacatcttgtgtactttgacacttctctacatttcacctaacctttaacatcaacacatttattcagaaaacttttacttttggagctgctctgtgtcaggctctatgctaggtgctcaggatattgaaattgatacaatcctaacctattcacatataatccaaggtttgctgaaattgatggacatttaaacaattgaaacatttaagtggtataattagcaaatggacatttaagccataaaaatagcatctaatagatataatagaggtcggtacaccattgatgagtcagagcagaggcaacccaaagagtaactagccagaagaattgggaaagcttcatagagagagcgatatgaaaataagggagagaattgtaaatccatgaaaatgagaaaaagttgaaaagtgatggtgtcagaaaaacttgtggtatgataatgacaagatgagaggaactcttggtaagcgtgttggatgcatggaaagaaatggcacaaaataatgctgaggacattttttattttattgttggttttgttttggttaatttcattttttaaatctagtatgctagtgttcattgtccaaactgtgaatcataaactcagtttgtggatcaacaccggcctttgatttttagtgaaacaaaatagaaaatatcagcattcatcacaaatagatgtttcacagattttttgttttaattgcgactgtgtgtgtgtgggtgtgtgtgtgtgtgtgtgtgtgtgtgtgtgtatgtgagagagagagagagagagagagagagagatggcttggatgtttatcacctccgaatcttatattgaaatgtgatttccaatgttggaggcagggcctggtaggtgtgattggatcatgtgggtggatccttcatgaatgatccctttggtgacaagttagttcatgctatatgtggttgtttaaaagagtatgagacctcaacccccacctgtttcctgctctcccctttgccttccaccatggttggttgtaaacttcctgaggctctcaccagaagtagatgccagtgacatgcttcctgtacagcctgcagaaccgtaagtcaaaagaaaaccccttttctttttaaagcacccagtttcaggtatttctttatagcaatgcaagaagggactaacacagttgtatgtgtatgtgtgtgttgggtgatttctggttgagtgtcacaaggttgtaatatggtgagtgtaaggaagtataagttttagaaaattaagaagccagttcagaaaactaatacttttggaaaatagtacaaaatcaactttacaagaatatacacagaaagatgtaatacaagatttatttcattgcagtaatttataaagttggtttagtgccttgcttttgcatgctgttttaaaaattaccaagaatatgacttcatgtgattttgaaatactcccagcaagataggtagaaaaggtattcttataactcttagacaaaaatttcggaaagtttaaacgctttatcccaaatcataaagctaataaatgaagaatctgggattcaaacaccatattttttttactgttcatcagctagaagttagaaatgttaagccaaaaacattaagtcactgctctgcctaataaatcttgaggaaactaataaaaagaataataccactgactacaggacaaggtcttcctaagagaccttaaatatattaagtgatgaagatgaaacttcttttattcataaaaatgttatttagttatgagtagagctctaattaaacttattttatattgtcatcagtaaagttgagacataacatatttattaatataattataatttgacccatagtgtattaaaagaaggatgttaaaaggagttgttattagagatgatgttagggttgttgatgataataacagtagtcataacataacaaagcacttcataatttaagaagtgccttcaattacattgttactctcatggtaatctctgtttgatatatagatttggcggattctatatcactctaagacataggttactgaggtgacggaggaatttagcaagcggctgtcaaatggaggacatgagcattggattgtgtatggcaagggctgatggtctctaagaaagcctcttggtttccacagggcagaagccctttgaagatcatagccaaggatttagtaattgcctccctttcagaataccctcaagagaaaagcccaccataagacatggttccctacaggcaaaactgcttttccttaaaatttactgttccctgaatatcagccttctttggctcattcaacatagttttcttaagtttcaggacagtgctgcagaccaaaagtttcaacattgaggaaaacaatactacttgtgcagtgaccctacctcagtcagggaggcagatgcctgcctttatgtgagggaataaggaatcaatcatatttccagcactcaagaaagccagtctagtgcagggagagatagatacataaacctcaaagttatgatatagcataatagttttaaatttccataataactgtattttaaaagttttatagaaacagaagagatgacctcagtctggaaaagccagcttggagaatggcaaccaatattaagtggcaaaagctttgggatcccaggcctccagatggagggtgatagcatgggccagacaggtaggttaggaaaactttgcaaaggacattacacggtacacagacaagtctgtgttttagcctataaaccacagttgcagaatgtgtttgagcaaaggcttttggggatgagatttgcacttttcaagatttaagtttgtttaggatacttacggtttgctgtatacttcctgggtttttacattataattacggtttgaactttaaaggaaaactgcagtttagcatacttgaaagagtgcaacttcaagtcatgattggagacagatatttaacagattttgtgatcctgtgatgcttattttcttctcagacataccacatgacaatcatttttaaacagtttatttctactttagcatccatctgaaggtgttgtgtatgttttctgcttgaaaataaagcagtgggctgggtgcggtggctcacgcctgtaatcccagcactttgggaggccgaggcaggcagatcactaggtcaagaaatcgagaccatcctggccaacatggcgaaaccccatctctactaaaaatatgaaaattagccaggcgtggtggtgcatgcctagagtcccagctacttgggaggctgaggcaggagtatcgcttgaacccgagaggcggaggtcgcagtgagccaagatcgtgccactgcactccagcctggcgacagagtgagactctgtctcaaaagaaataaaaaagaaaataaagcagtgaatgcgattaagatggatttattatgatcataaagtactcaggagtcttattttaaaagacagcattactgtaattaaaaatatagggaagaaactaatgctgttttgcgtatcattctcagctctctcaaaatcagatattaagctcttgctgccaaaggagactatactgcacggtgctcacctgcataaactttgagagggttgaattgtgccaagcaattctctcaatacataaattaaccaaatatttgttgacctactgtgtgacaagtattattccaggaaataagagatccagcaatgaaacaagtatggcttcttatagagttcccaaaaaggaaataaaaggatatacgtatagtgatatccctgaattaaatttctcttttgaaaataaaaattctatcataagctgtaactgccaacacttcaatactcattcagcagttttcagggatttgtaccttttgacttatgagaatttggaagtctaattgtatcattgcactggagtcttaaagaaacagataagcgaatgactttgcctgtatcattgttgactgtacttacaatcagaaaggggcacaggacagatgccagggagtaagtggacagcccataaatggaatggtaagaaagaagaactatagtggatttggaaagttcccttcagcattttccctagacaatctttggctgtgtttgcatgatcagtatttcattcacaggatattgagctcttgatatagttctcaaaacccaaaatgaaataagaagtctactctttatttaaattcaaattccagagagttaagtaactttccaggaggtaatctaaatatggcctccttgttggggggggggggggtgtttgaatttgcatataaatagtctcacccttaaaggaaaaccacagatggtggtaatgatgtagtcataatgtacatctccacagtggtggaacaaaatatccacagttttgctttccccagtttcagtgacccatggtcaactgctgtctgaaaataggtgactacaatacaataagatattttaagagagagaaagaaagatcacattcacatgattttcattacaatgtattgttataattgttctatttttattcatgatttttaatctcttaactgcgccaaatttataaattaaaatttatcacaagtacatatagtttatatagggctcagtactatctgcagtttcagacatccactgggagtcttggaatgtatcccctacagataaggggtaaaccactgtatcctatttgtgtgaatgctacaggtgttgtgagctcataacaatatgacatcaacactgaactaatccaggatttggtagtgagagtgatgtatttgcaaggagtgagacgtggtgcctcatccaagcagagaaataattttgaaatttgcctgacaataaaaatcacaatgtgaggtctctctttagagctgcaaagtccaattcagtgccccctagccacataagatactgagctcttaaaatgcggctagtactaattgagatgggcactgagtataacacacatgccagggtttgaatacttagaaccaaaaaggaagtaaatgctcatttattgcatgttaaaattatggttttattatagttgattaaataaaatatataattaaattgacttcattttgcttttaaaaatgtggctatgaaaaatttcaaattatatatgtgtgtgattacatatgtgtgttttcacatatgtaactgatgttacatgtgaaattgattgttacatgtgacatgtaaaacacgttacctaacacgtgcatatgtatgcaacacatatgtaacgtgttacatatataacacgttacatatgtattgttacatgtgtgcttgcattacacacatgcataatatgaaattacatgtaatttcaaattacatgtgtatattttgaaaattacaaattacgtattttgttatttttgctttacaaagtcaaatttaccctatttaataaagcatcatgagttttttataactagtaaactttgagacttttgtaggagaataaataatgcttattataaaaactgattggaaaagtgagctggagcagggagcggaggaaaaaggactagagatcacctttcttcccagctccgctcctctcccaaccttttttctttccattctctcatcccaattcaaaagtgcagagttcacagttggtgtgctgatttagaaaacagatatataaacagccttaaattttctccaggcttttacaatgaaaagaagttcaatatcaaaagtaacaatataatctgtggaaaggtatagggggctatgtttttgaggtagaaactataggtgctcctggccaagcatggtggttcaagcctgtaatcccagcactttgggaagctggggcgagagtattgcttgagcccagaagtttgagtctagcctggcctacagggtgaaactccacctctactaaaaatacacacacacacacacacacacacacacacacacacacacacacacaaaagccttgcgtggtggcgcttgctgatagtcccagctactcaggaggctgaggcgggaagattgcttgaacctgggagacagaggttgcagtgagctgagatagcaccactgcactccgacctgggtgacagagtaagactgtctcaaaaaaaaaagaaaagaaagaaagtataggcactccttatatgcagctgctcacacccctcctccttcacacccctcccccttcacacccctcccccttccccaaaatttgcaaggggaaaaatgtgtgtaattggcagtatttagtggcgtgcaaccgtgagtcatcagactgcacatcctcacttctgctagtggctcagtacccaacagcactcagtgaaaactaactcatttcaaaggtgaaaacaagtgagtttggccaccagggagtgttcaaaactgtcagtgctgaagcaaatgtggagggtgttctgtagtttgttcaggttgatatttgtggtccaacccctagctgaactactaattattaatatctgtcttgatggtgcctcaggagaaagcttctcaaagggaatcaatgttcaaattatagtaggtatcttggccatggaagttattgaattttagccaatacttgctactctttcatttatagtgtgagaatgcagtgtaatgaacctgactctcactgtcctgacttgcctttctcatcgcattcacaataagcacgtcaatacgtatacacatttcatatttctaaagtttactttatttccttattgtacatcgctgtgctgctgatggaagagaaaaggaaaaacactattgattgcaaaactgttttatctttggtggcttagattttttttgtatgatatgtaacgtcttgcatacctaaggcaacacgaagctaaatagatttgcatatagcatgtattttttccaattaaatgtttaattttgttcagagtatactggggacattttgaataatggagaaaagtacaaagaaaattcataattctaccacctatcagcacagtgaaattttatgaagaaacataattttcatgtaaatcatagtgaactcacggtaggttttatttaatacagtaattggagagctggtaggaagacaaaactggttcaaaagagaatacaagaaacaaatgcttctataatgagtgaatttttaaaaaagtattctggaataagattagtgaataagatactaaactcgttgataccctacagcctttggggttatatcctctactgggtaaaaagtcatttacatcatatcagttttctaaaatttgcattgaacttcatagcgttgtaacatgtgtgggcccaaattaatagtaaacagtaagagttgctttactctgaaaatattgaagctcttgtgagggtgtgaggagtttgttagaaaacaacgctaccattattttgaaacacacacgatcatcttttgttttacttctaagttttggataatttttcttaaattatcttattatcttatccattttcttaatttccttaaccttttaaatgtttctcctaggcacttttattgatttttggaatatagttgatatgtgctgaatttttatcatccagttttaattctactgaaaaatctaaaagatgttcatcaactactatatttcaaatgcatacatcccctttcatgctaaagaaactgtatgggaaacacagtctgacattttcaggacctggtatcattaaaagtcttgacactgttaaaattaaacaacgccttttttaaaatcaaaggatacaaaagggctgtgttggtcagaggatacaaaatttcagttagataggagacataagttcatgagatcttttgtacgacatagtgactataattaataataatatgttttcgaaaattactaagagagtcgattttaagtgttctcaccgcaaaaaaatagtatgtgaggtaatgcatatgttaattagctcattttagctagtccacatttttcaatacaatgtgttgtataatacgtgatatatacaacttatattttccaattccaataagtaaaaataaatgtaaattatttgaaataaataaaatgtgaagaacatccacttttcatatgaaaccatgagatattttctgttaaaagattaaatgtccaataaatttttgatgttaacagaaacaaaaatgtttaatatttaaatacatatttgcatgctattgaccccctgaagttcactgctgggctaagtgaaccaactatatcttaagtcaaaaatgctgaaattcttccccaaatcccaaagctcatgaaaacataaacagaaaatttccaaataattctacagggaaaataagacacactatttgatctgatcaaacaacgggatgattatggttaataatgagttacttgtacatttaaaaataactaaaggagtgtgattggattgtttgtaacacaaaggagaaatgcttgaagggatggataccccgttctccatgatgtgattattacccattgcctgcctgtgtcaaaacatctcatgtaccctacaaatatatactcctacgatgtacccacaaaaattaaaataaaaaagagagggacccgaagataagctaatatttaagctcatcatacttattaagataagcaatacataccgaaagtaatagcatttaaaaccagatgttgggggagggttctaacttgttcattaaaattcaaagtcacctgtcttgttttttcttttgtttttgtttttttttttttttttttgagatggagtctcgctctgtcaccccaggctggagtacagtggcgcgatcttggctcactgcaagctctgcctcccgggtttacgccattctcctgcctcagcctcccgagtagctggtactacaggcgctggctaccacgccccgctaatttttttgtatttttagtagagacggggtttcaccgtgttagccaggatggtctcgatctcctgacctcgtgatctgcccaccttggcctcccaaagtgctgggattacaggcgtgagccaccgtgccaggccacctgtcttgttttatcatgatcccgagagtatatatgtatgtgtacagctcatctaaaccctttttctttcaacatgatcaatagattgaacattggagatattttataagaaataatgaagacaactcaatcagcacatatatatattaaatgtggaatctataatgattgcgaagcctgaagcaaactaaatattcagtaataggttctttttttccatggtatatccatttgaatatataacataaatgccttacatttgttttaactatttaaggtttatgttgttagtgtgatgaaatggctggcaaaagtcagaaactcaggaaagtttcaggcttatatctggagcctggttttctttcttcaaggtagaacctctgtgaagtgaaaaattttttttatatctggagcaataatgtagaagcttaaatgtattatccaagttgtcataagcctattatttctttacattactgaagtgaaagacagcattaatggctaaatgccatacttggctataatttatattgtttaggactggaaatgagcctgaaatgtacatttttttccaaaatagttcatgtaatatttgaaacctgacaagtaacctgatgatttcatggaataccatcaaatataaatgtgaagttttaaagacacagggaaatactcagaataaaccccctaaccacaggccagcagaagaactagacttgagaaaatgaatgggaagatagatagtaacaaatgacttctttggcagccttatatatgcttagtcttatagactgttttatggatgctctgcactctatttccagcaagtatggcatttggaacaggaccacacgagacaaactatgagttcacatttcccacaactgcacagatagaaagagggaacaacagaatactccctttcttcttgaaacaataacttctgttgaagctcactggcttcttttcagctgtttctgctagctcctcctccgcctcttgacctctaaggcaatgctcttcaaaatttcaagactgctttctaattgaaacaaaacttataagcacatttcttcccacaaaatgtacatttatttgtaaatcatatatgaatatgactaagcatgtaaacgtatgtgaaaatagaaatcaataaatataaatgcaaacacaaatagaagcattcacagttttcttttgtgtcccagtgagttgttccaaattcctcggaggtaggtatgtcacagtttgagactataccttcaatcctagggtttctggtttcgctctcctcctaggtgatagcatccatttctacggacttaactgccatctttagttgaataactcctctatctttccatcccatatttctcttgattccaaacctgcttgttcacctgagcatatgacacaattcattggctgccgcacatgcagctttgacattttatttaaaatctttccccttccccagccctcatctatttcacagtagtatcttcttcttatctacttgattggtaagcagagtccacatgattccatcatttatctcccattttatatctaatctataagcaagtaatgcaatgcaacttctgtctccaaaaatttattttgaatttgccttctcttcctctgcatctcccccatcttaggccaggtcacctctgccctcttgccagattaggtcacattctcttactactgttgttattctcttcctattcaatcctacaccgcagcaaaatggatcttctcaaaatgtcagctagataaaggcatttctgtgcttaaggccctcatggatttatcttattaggatgaacacccaactctttattatggcttagaatacaatgaattacaacacataatgaatatattatatttctatctttaccattttcttcttaagtcaacctttctcaatccatataggataatcatattagtgcttcctcactttctaaaacatctcagggcctttgcacgtgtttctctgttcttagacccagaatgctcttccttttctctttgtgtagctaggtgcttctttccatttacgtatcacatgaaatgcagtcattccctcctccttccctcactacctcacaaaaagttgatgcctctgttaaaccatgaatggaattttactcggcagtgaatagaggaaaaaccaatggtaaaagcaaccatatgaatgaatgaatgtcaaaaatattatgctgagccaaaagtcatagacacaaatatgggtatttacatgaagttaaagcacagcaaaactcaattacggtaatagaattaagaaagtggttacctctgggtgagggttggaattgagtggacagaggcattagtgactttttcggggtaatggaaatgttgtctattttgttcaggtggtgaatacatagatacattcaattgtcaaaacacatccatccaaacacttagacttttgcactttattatatgcaaattatgcctcaactgaaaaaagtttgttttcaaaattatatcaacagttgaaattcttttaaagatttgattcaaatgagattaattctgtatccatcattgatgtatgatagttttgtatgtagttaaggttattggagataattgaaagttatactcacaagaaggctgcataatatgaagtttatctgccttgatctttaatagctttcgcgatttcaacttcttcacagctctgtaagaaggcagtgtggcatgttgaagcaagcatgtgttttagagtaacacagagctggtatacaaccccatgtctaccaattatcaatgatgtgggtatgttgctggatctcaataatcttccactgtgaaatggaatgtaacacctgactcacaacgcaaaggtatttaccttatgtaatataattcctgcgatcctgggacctcccttaatcccatccacagatgccaggttaaagaccccatcacagactagaacaagttgggatgtcaaaatgaataaatattaatcgaagggcctattgtgattgaacaccacgcagtaggcactctctaatacctaccgtctccctcctttttgggggaaacattctaaatgtgcaaaaaataaagggttatttgctttctggcacttgggatcgatttattgaggatatgttagcagaacagcaaaggtgaaacactaaaagcaccatcaatacacaggcagaggtgaagccataaagcctttattttttaaattaatgcacaatatataagaggtatgttagaatgaacgtccaatccctgaaaggatatacgaaagacattcataaaattacatgggcatgttttcttaatgttcaaaatattgttttaattagtgtattatgagtttattcatgtgtctgtgtgttgtgttatattaatcttttcttgcattgctataaagaaatacctgagactgggtaatggatgagaaaagacacttacttggctcacagttctgcaggctgtaccggaagcatagcagcatctccttctgtggaggcttcgggaagcttccagtcgtggcagaaggcagaacgggagcaggcacttcacctggctagagcaggagcaagagagacagaatgaagtaccacacacgtgtaaacagccagatctcagagaactcactcatcatcatgaggatggcaccaagaggatggtgttaaaccattcatgagaaatccacacacatgatccagtcacctcccaccaggccccacctccaacactgggaattacatttcaagatgagatttgggcggggacacatatccaaatgatatccatgtttaatcagaaaaataaaagttaacagtaacagtgattttactttgtagacctttgctaatggctgaaatctagctccattccgagaacagcctgcggtacacattttgaaagatagttgattaatatgaaagaagccttatctgtagtccttaaggccattatggtttacatatatgagtaaatattccaaagtagccatgccagttaacatatatccagagtctaaaggccactgggcgacaaaagtaaaagatacatagcaattgttactttatatcacagtaattcttgtatattttaaatggatatttgcatttgaggatatccacttaagagttaggtacatggctcttacatttaagtaacatttacttaaatttctggctgcagcaattccacataggtagaaatgaagtctgaattgagttgggggtctttgcagtgctctctctgttcattggctattttgacaatgctgagagatgtggttagccattctttttcatttcatattggcaacctagagagcaattaagccttctccccttaactagatgtatgttttactcatttctggatctttatggctgactttgaatcctagcctgtggtagaaagcatggtgtcagaaggaactatgagttaagactatgcatacttggctttgagtcttgggtatcatacctccctcatagagtgaaggaaccagggattcttcttgaggcccagacccggcatccatgttaagaatacctgtgcaattttgcttcctgatatttaaggtgaaaatgcatgtttgggtcattgtgaggattatgtgagatgttacttttaaatataggcccccttattatatgctctcatagtttcaggcaacacttgtcgtatttgtaacctcagttttaactgtaatgtttccatcaatgtccctcttacctggtacaggggctcttcatattcttggattacaaatctgtgaatgcaaccatgcatcaaaaatattcagaaaaacaatgaatgcctacctctgtactgatgatttataggtgtttttcttgtcattattccctaaacagtacaatgtaataagtatttatatagcatttacattgtattaagtattataagtaatctagagatgttttaaagtatataggaggatgtgtgtaggttgtatggaaatagtatgtcattttatatgtcacttgaacatttgtggatttgctatccgtggggatcctggaaccaatcccccatggatactgagggacaattgtattataagcagcaagagggaaaggaatctgtctattttgcccaaaatcgtgttcccgggacctagcatagctcctggcaaagagtatacaacaaatatgcattgaggagagaacagagggaaccattatccccttattctcgctgttccttcatgtaatgaataaacagtcaaatcttacaagagattttaaaccagtcagagaaaagttggaagttagttagttgttcatacattgagaagcctcgacgctgtgtcatctaggtaatgaaagatctagggaagtttagcagggagaagaagagagatgatagttgtcttcaaatgtttgaaggactgttacggacacaaaaatttaaacttgtgctgaataattccaagaggtacacagtctctcgatagaagctaaagtggggggtgacatttgactcaacaaaaagccatctaaatatcagaactttcaaaagcaggaactggtgcctcaattaatagtgtgttttctagcacttatgatacctgatcataggcaagataatgaaaaattgggacctgggagttatacatgggaatttgtttatcagttgggtgattaggagaggtggccttaaagtcctgttgtgttctaagagtctgtgattctgagtcttatttcccaacaagagaggtacagagcagaagatgggattgggagaaataggataaagataccaggaaatcctaaaggtaagaaaaggaaggcagacctgaagctaactctatacttcaggtgcttgcctagagccagccctacctacttagagaatgttgaagagccagttaaaacatctttaacacggatgtaaaacaaaactatcaaaacctgaagatttcgaatgttctaacctactcgtcagttgggcttttttcacaaatacttcagtaaataggcataaatttattttttaatgatagaaaatatctcttaaagaacttataactgtggataaaagcaccaccataaaaatcttgtggtgaaatatatatatatatatatatatatatatatatataaaattttaaatatggttagctagaatatgacgacaatgtttatgaaacacagagactcttgacaagtcccatgtatacactataaaactttaagttatccactattcactcactaagcttatacttaatgagtgtctgctgtgtcacttattgcggaaggcacaggcggtatagcattgcacaaaacatatgtggtctctgatggagtttttcagtctagtggtgaaagcagtgaatgggtgtacagatgttaaataattgtacaattagttgcatgtgtaaacgtcaaagttcagaagatgacaattgatctacggcaatgtttctcaatctctgacgttttgagccaaatacatctttgttgtggtggactgccctgtccactataggatgtttggcatcacaactgacctctgcccattagatgccaatagtactctcttctttaatcacaaatttgtcccagacatttccaaatgtcccttggggagcaaaatcatccctagttgaaaatcactggtctagggggaggtctttatgaggaagtaacatctaagaaagctggtatgtttacatatagctacagtctattacacatgtatacatatgtaacaagcctgcatgttgtgcacatgtaccctagaacttaaagtataataaaaaaaatgtaacaaaacaatacagtatgataagtgctatgggaccaaagatgaaagggttctactgcacagttatgaactcatagttaggcttttggggtcaaaattttgctgaagatatttgccacccacgtgacctttggcaggtgacttagcttattcatgcctcagttttatccaatgtgaaatggggctggaaagtcccatgtacttcctaataactttgcggaaataatatgtggttatataggaaaaaaaaaaaaatcctagaagtatgcctgctgcgtagtaaaaggaaggagaaggataaagagaaatctgcattttttcttctgtaatggggcagatagtaaatattttaagttttgtggcccaaatagtctctgtcacatttacttgattctgcagttgtggcattggaagcagctatggacaatacttaaattagtaggtgtgcctgtgctttcaataaaattttataaatacaaagtttgcaaaacaaagttgttttttttttttttgtagtttgctgacaccctagtaaagaagcaccattgtcaacgttaaaaattatcaaatttttatttttcaaagttttcaaatttgctttgcttggtctagctcatgaaataagtcaaaagtagcaagacctccacctctaaaataataatagtaatgataacctcaaaaggaaagaagaaatatttttaaagaagaaaaattattgttaaataggattattgtgcagagaaaacctaggagactcaattttaaaatctgtgaaataattttaaaaatactttatgaatagatacataatagcttttattcatattaatgactataaatgcaaatggaaatatttcattcacactgatgacaatgtataaattaaggaggaataaaaattgtagaccctataggtgaaaagcataaaaatatacataagaaaaagcaaaaattgactacgtaggattgttttaggatttaagatttattgtcattaaacttgcaataccagccaagttaacatttgaatttaatacagttataatcagaatgcttttgatgtgtttgggggcaatataatttcaaaggaaataggcaatgatgtaatttaaagtttatatagaaggaaattgtgtgcgtgtatgtgtgtgtataaattggaaacaattttattaataagcatattatggcagcaacatacacttccagatttctactatactttgaagtaattgtgatcaaaaccacagtgtgctggcataaggctagagaaatgggttagtggtttacaagtgagagtccaggaaaacatccaaataagattggatattttagttctgtgtggatagcctatttcacttaataaatagtgtctcgtaattgactattcatgtacctataagtttaactatagaccaaaaaaacgccctactagattaaggagctaactagaaatataaattcatataaacaataaaggaaagtgtaggactttataagcttcatgggagacagatttttggtaagtcaggaagcctggaagacttaaaacataaaattggcagactgaattaactgatagtttaaagcttccatagagcaaaataaatcataaaccaagttttaaaatatataatggatttagagaaggtatttacaaaaatatatgactaatggaggttaataataacaatatgtaagaaggatatgaaatggcattttactataaaggtcaaacaaatgacctataagcataataaatcatattaatctccactagtaataactacacacatctacataatatagatgttacgcctgcatttgatttactttatctgtcttttggcagaactatttgtcaccagataaaaaattctatatcattaccagaaaggtatattattataatgtttattatgttgcagttgtaaaagaaataacagcttttcaattgtttacaaatcctatagaacatttactgaaatacatttacattttgtggcaaacttggatttaaataccgtgttcgtgctttgttttatgccgttttcccatcttttctccaggaatttgattgtgcttcattgaaagctaaaaagaaaaaaaaaataattctggttttggtttaaaaaattaggttaggggttaaaaagttgtacgttgtcttctgtaaaaataaaaaacaagttttctttgtttcttggaggctttatattaaatggatttttaattcatagacagcatattgtgatgaaatttccccatgagcttcacattttgtttcaatagcagaaactaacttggttgcagttactgcccttctgagaacagtgttctggaataattttgacatacatatgtatctctttttaaaacatgtgttaatcttttcataaagaaagttttcccagctgtgtcacctgtgactccaactttctggggggacagggatatgagatgttggaagggaatggcttgaagaaataaagtgcaaaagacgtaatgctttcctgtggtagaaatgtattcagtgaccctgaatgaccttcctactcttgtcccttcatttttcccacaagtatggtctgggcaattataaaaattgacatttgcagtgggctcttctgtaaaagatgctcaatcagaaatgatttattttagaaaaagagatgatataaacatatatatcccctgtctcggaagtgtgaaggttgaaaagcaaggagatgatcttcaaagtgtctaaaatattgatttgtaacatcgttttatgaaagtgcttcagattattttttttcttggatggccccttatgctttggtcagttgatgctaaaatctgaacttctttattttaaaaaaaacttttaattttgaaaaaggaagttcacggtgctgtctaattctttttagatagtcattaatgtaaatgtaagagtcattctgagaaccacatctgctgatatgttccgttaaattacaagttctatgtgtatttgctttgctttcatacaatgaatcttctttactctcttccccacctgccagaaattgccccactcaacgttcataaaaggtccattttcaatcgctatatttatttcagaagcagagatatcatatattcaaattttagttactttccaatatcaagctaataactcacacaaataaatcaaactacagcaaaacagcaatctagcattcaacaaaacctccccaatgcacatatttcaagctgtagatatgtatcatccaccatgctgaaataatgtacatgttcaaatcaaatggaaaactagaatcaaaattgttgattacttcttatcagggcattttattatatttaagaaaaatacaaattaaatcattttcaggaagcaatccttctggctaagatttttttagcataatgcttaaagttaattgttgatctttatctataaattcaaaggtggactaaaaatgcagaatcaatcaggtagtccattttgcatcaggtgaaatatataaagcataaaacagcgagttacatttcctaacaaaattgaattacagtgagtaaaagtgacaggacaaatgcattaagaaaagatggactgaaatggatagagtagaatatatgcatctataaaacacagtcatatataatacactcattttttttcttacgagtgtgagattaatggaagaaaacaacaataataacaaaaccagtgtgatgtgtcagatttcaccttttaattaaaaaattattcacttcagaggggaattttctttcttgggttagctcaatcatgtcagatcttgttcatttaaaaggtcagtttacttgccttctgaggtttttgtttgggaaaaagaaaagaaaatagattttcattggtatcctgggtagaattaattgtttatcattcatttttaagatctccgagaggcagaaaaaggggaactgtgcaacccttttgtccttctggatctcaaaatgaagggatacattctgctacatgaaatgtggaattaagaccatgatgcaacatgataaacaacacaaatttgggggtgtctctgtgctatacattattgaatttttccatgctatacactttttggatgtgtctgtgctatttattcagtttttttaaataaaagtttttgtagactaaattgccctctctactttgcatcgtttttgaacaaaggattttcaagactgataagctcaaatgtatcatttattgtattcaagtagcattcaatttttctttagaagtataatttgtagatattttaacacagaaaacttgcaacactgctcatgataggcacttattatatattttttgaaagactatatggataatgattctaactttgacttttcctgttttgccttcactttagaattaagcagagaatcaaatccatattcctgggggcgatgcttggacaacagtatctctttaaagatctttgtgtgagtcgaaggtgcagccagactgggagttattgtgaagaaacagattcaggaaggttgagaaacttgcctaaggctaatcagatagttactggcaatgttgtttctaaatcactgtttggctccctcattcaatgaatctacactatgtgggactgcctcttgctcctgacatcttttgctgctgaaataaatgaactcaaagcctagaaggtagaaaagagggagttcagaattatattcaggcacaaataccaataaggctattgcccccagaactgcaacttctcttggtttaacagataactatttagctgtgaggtacaactgaggaagtggacacacaagttatcaggagattctgatgtgccagtttatatttcttgtcacaggtaatgattcgaaatttcttaaaacagctgtcctcacagtggagtaacctgggagtacatgaaggcattccaaggagtaggcacagatagttttaagggaatttatttctagatcttctactttattttgtactcttcctgaaaactgaattgcctgaaaaaaaaaaaaaaaaaaaaaagacatctgtagtcaagacctcaggctgtttctcctttctaaccacttgccttttctaaccacttctcccaatttaagaaaaaaagccttatatttcatccaactctgatcttactaaggcttcaaacaaaagaagcatgaatgactttcatgacagggcaacatagctttttgcaagaagagtggttgctaactctttgctttcaactgaacccgaagagaagacctgataagttgtcagccgatagatcattaaaaatacgttttggtaagcaatcatcatgtacttttagcatatgccatagcaggagcacaaatgattaagcaatgctactataatacaattccttccgtttctttctactcacctatttgaataagatttttcatcatttacatctatacagacaaaaattagggatagaattgatgctgaagcctttccaattgtagaattaatttatattcttctgaaggtgtataaattgttaaatacccatccatcttattaagagatgtattttcaataaaattttatttttatgtttatcaaattttataatatacatatattgttttggtcaattgcacgttaataattgtaacaatacctcaattgaaaaggtttgttttttacatttaggacttacagtaacagaaaaaaaacactcattgtgtatacatactgtttaagaaaagtatactaggtgatcaataagattttttcaggcataaacatatatcttagttttaagatatcgatatttacaatgtccctcaaattatattattttcagtcatttaagaatgaaaagtacatttcgaatgcggattttaaatctgcaagggttgactcatttttcaagagtctttttaggggatacagaagcaagaatgtttggagttccctgatcagtatctttaagagaaggtatttgttggtagttcctagcaaattccaacagcctgatgctacttaaaagataatagtaattattttaaataatgcttctgataaaaaacattcatgcacactcagtttaaaaagatatttaaacatttgtagttgtagtttgggaactcatgatacaagtacagtctgtaaatgaagctcttagtttgcaaatatcagagataagctattaaaatgcagaaattgaaattgccctgatatatgcataaattagtgtcatctccatcttgtcagttagagtattttttagattctctctatgtatacatacatatatatatatatatatttatatatatatatatatttgtgtagctgtgcatgtgtgtatttggactaatgggtcaaaggacagtactaacccaattcaataattaaagaaaacataattttgagaattagctttatggtaattgtttgacttaaatgagtagatcagagaagaataagggctttcccttatttaaacaagcttcatttttttatccaaacatttacttagctgattaagcttcacttgtttattttcttcaaagcattcattcaggtgggtactgagtaaactgaaatatcacaccagggaacttcaacaccatccaagtcttaaaggcttcacttgttcacagttggcatttagtgaatgtctaggctactgataatattgtgagtaagttggcagggatcataagaaatgataaaatacagttcttgaaaatgttatggtttgaggaaaagatctatgtttggaattagactgacttggattcaaactctggctgtacctttgggacaaggtgttcagaaactctagcctatgttttttttctgcaaaatgatcctcttttccaggattcctgtagagattcaaagatatgtgaatgtttagaaaaagaatagacttttgatcattgttaattcccttactttccccaattagacttgtaagactgggaagaaagctacacaaaagattgaacaaattatagctgacagaccatagcaaaagatacagggcaaaacttaaaggggaaaactacacattaaattattttaaaccattaaatagcactaacttttgtcagatattacaaccaaacaccactcaaattaaagtaaactgaataaaatgcctgtttttttctgtttactgatgttttcatttgcttcattcatttattggaagatataaaatgtgttagacactgttaggtgctgagtgtataaaaaaatcttattaatacaatttaaacacgcacacacatatatatggttataacaattgatgccatgtatgtactgtttatatgcctatacattattccacagacctggggggagggggatgtagagtcttaccagaaccataggaatcttctcacatcaacatttccttttgaagtttgttcatgaggcaccatccagataatactaccatctgcaatgtggcttgagaagatgttagatttttttattacacataataaggctgtaaagtatttctgtatttaggtagaggtatgtaatacaatatgtatataaaattacatatccaataaaatctggtgttaaataaggactagcttctatgataatatagtctaaaggcttttcatttggtgttatagaaattatgtgaaatatgtttcctggagtagaattattcgcatttcagctctctgacagtggaagaaaagctagagggagaggtgaacaagagagggagcataatggacaaagctttgctggaagccaaaccaccacttcatatgtcaaatctgacaggcctcccattttaggtgtgctgtcattgaagctttcagctgcaccttgcctgtggctaggctattttcaaagattaaaatgcgaaactggaaattaaatgcaacttaattcccaatttaaatttccattatttttgaaaagtaaaagattaaaagaaatgtataattgcaattctggtggaagaggtaattataggaaaggtgggatgtatttcaagtgggggatatagcttactgcagcagagaggaatctaagctatcattcttttgaaattggtctggaaatatgttttcacatggaaaatatactatatttttaggaatttccttgtcatattactgtatccttttctgttagaatataaattctgaattccctattccactgtagatctgcctccgattatattagctcttctgaagttatcaaaaaataatgagatatacaatattccatatatgtcaaagcaattatttttaggttaagtaataaaccaatgacctttaacccggtaatattctgggttgttcataaaaaaactatattcaggtaataatgtctttccacttaagcaactgaaaaaatacacaatacttaacatttggttaattaaatacctactccagacaaaaggattttctgttttcaagttatcttagcaagctgagcaggaagcaatgatatatccaatcagaatatccatggaagctctgctacagtttcaaaaagttctcatcaggcagcttttaaaatgcctactctgaaaatggtccaggttaaagaacaacagcttcctcgtcagatagcagtattgcttggccatgtttcttcctagcacaaaaaagtacctgctcttctctgagtacctacattctaaggactatggcttacataaaacagcatgggttggggcaatttccagcacactgctcactctcgaaaacgtatgatgcaggtgagagtaatgtttttgtttgaatctgctttcactcgtggaagatgaaactacttgcaaagatctgtactttagctattatgagtaacaaaagactcctaaaatattgcacacattgtggggatggagaaccatcatcctgggatttgatggatcctatggtttggctttgtgtccccacccaaatctcattttgaattgtaatccccacaatccccacatgtcaagggagagagaccaggtggaggtaactgaatcatgggagcaatttctcccatgctgttctcctgatagtgagtgagttctcacaagatctgattgttttataaggggctcttcctgcttcactgggcacttcttcctgccacctgtgaagaaggtggcttgctccttctcaccttatgccacgatggtaagtttcctgaggcctccccagccatgctgaactgtgtgtcaattaaacctctttcttttataaattacccagtctcaggcagttctttatagcagtatgaaaatggactaatagagacgtgtctctcagaagtcacagtgatgcttgaacggatccagagctccttcttcaggaaggtcccaactcattctgaagggtctctccaagcccacctctctctgtaaatgggaaaggttttactttgagcactaaaacctgccagaattctcaattttcctaacagtgtgttaataaacacctactcatttagtatccaaaccaggtctgtatttctcaattagagctcaccaggctttcatcataaagtagagcttcaaattgtctgcaatcccactcctatcaaaaacctagaaggaggtaatatttcagagtaatactataaccagatgaccacatctaagaaactgctgaccctacgatgtaaccttctgtccatttttccctttggaaagtctaggatcttttcttataccagcaagttacaagcctggactacactaacttgctttccgcagaagaaaacaccatgagttctgttttcatattaagcacttagtctccatcagacatcaatcgagaaaaaatcattaaaaatcacattttatatttgatgtatatttctcaataatcctatgtattagttcattttcctactgctatgaagaaatacccaagactgggtaatttataagtaaaaagaggcttaatggactcacagtctcacatgactagggaggcctcacaatcatggtggaaggtgaaggggtagcaaaggcatggcttacatggtggcaggcaagagcgtgtgcaggaaaattgccctttataaaaccatcagatctcctgagacttattcactgccataaggacagcacaagtatttagctccctcagcacagaaccatccccgtgattcaattacctcccaccaggtcactcccatgacacatggggattatgggagctacaattcaagatgagatttggatggggacacagccaaaccatatcatcctatttggatgatcaatattatcaaggtatgctcccctgagggggcgtcctttttaccatttaactccaggacaaaagtttatttctttgtaaggacagtgtttatttcttatggtcctattttctcctaagatccagacaccaaaatggccatctatcattgacttaactcctgaattttgcttagagtaacagatttagtgaatctaaatattttctggctgtggaatgttaatttatacatgttcaagttacctttgattcatgtgacagtttgtgccaaaacacactcattatcagaactcagatcattatgttggctcttgttttcgttactaaaggaagaaaaacagtttctcaaaaagaaaattctgatacctaggaagaccattatacctcactcttttctttatctcatcaccacatccaatattataaaagaacttacaaagtaaaaagaaaggtgttctgtagatgtagcgcctggcttgtatggtagcttaaatgaacacagctaaaaatattttatggctagtgtccaaaacagtctggcaccagacaaaataagaatatttaaaattatattttagagttactttaagaggaagggagagagagatgtaggcaggaggaggaggagcaggaggagagggagagagagagagagagagagagagagagagagagagagagaatctggggtttctatggaagggctaagaatatgtagaaaacagtttacaaagaaatatggtccaagaatcgtgtgtacacacacacacacacacacacacacacacacaccccctggaatatttttcagccttaaaaagaagaagatctgtcatttgtcccaacatggatggacctggaggaccttatgctaaatgaaataagccagaccaagaaagaaaaatattgtatgatctcacttatatatggaatctttttttaaaaaaggtcaaatatatacagatagtgaattaaacagtggttaccagggtcagggtagttgtgaggaaatggggcaatgtaggtcataggatacaaatgattaaaatatattaatatattaaaagatataatatacatcatgaggactacagttaataatagtgtgtattcaagatttttgataaatgaatagattatagctgttcttgccacagagtgaaaaatgggtaactgtgaaatgatagatatgataatgttctccacaatggtaactattttacactatatatataaatatctatgcatcttacaccattatgtggtatcccttaaatatatacaataaaatttattttacaaacacatattaggaatgcatattctgatttttaacaatagttaacctcattaatatatttcacactatcatttctagtgtacatgaaaagtagtttattgacattagttgtaaaaaaaaaaaaaatggtcttgagacttttgggtcagagaatgttctggccataaggtaggtttctgcttgcctactagatatcttaacttcgatttcctgaacatcccatcacttcagaatctctcaatcctttctaacatccgcaacattgtttttctttctgcatttcttatattgactgatggatttataattcactttctctgaaaaaccctgcagttatcatatatccctatccattctggctctttattgcccaaatctctaccaaaatcctgtcagcacagcctctgaaatatttctcaaagcatttataatctggctctcatcaacattttcaacactctgttttatcattccactattttacatcatttcattttcatttttaccacaatcactcatccaacaaataagtatttagctccctcagtaattagtattattattattaattataactagatgctgagcatacagaagtgaacatgacagacataatcccagcagggatgtcagactttatgcaagtaatcaaccatgatgaatctcatgagattctgagagagagagagagagattgagagagagagagaaaggggaaccactggtgtccgagttagaaatttgaattagtatctgggtcaccaaaagcttctgtgaagaagtgatatagacttggccacacaaaactaccgtgaaggtggtggaaatttttctatgcagagtaccacatttaaagagctaagcctgagagtgtcagagataaaggaacagaaagaatgtgacagcagattatgtttggaagaaagatgttcaagagaccaagctaaagaggagatggggctagaacctggagggtccttcgggtcctgttgggagttttttctctgcccagaagggctttgtcacgtggttgtcaggaaagagtcatgattagagctttgattcagagacttctttcgctgaagtgtggagaatggttcagagagaagcaaatctgaatggacaaaagaggttattattgtaatcttggcaagaagcgatggtggtcttgactaaaatagttctagtgagaatgtgacaacaaacctgagaaaaatacaggagacgtaattgacgggggttagtgttaagttgaacgattgcagagttgaatttgaggaaagtgtcatatatcattcccagtttctgatgtcatacacctctggagataacactgccatttcttttgaaatgggaaaataataagtgatcagtaagtacgtattggataaaataatgaatggttaaatgcataaggggagaggaaaagagttgcagagaaagagagtaaacgtattttggatgtgttaattttgagatacctttgaaaaatccaagtgaggggttgggtagtcagagaaatgaatgtggatgtcaggacgaaaggtgaccgtgatgaactgtatgtcttcctctaagcacgttatacagcttcatgtcacaagtgactcacttcatgtcacaagtgactcacaaggtcacttgtgacaagcatttgcctggtgcttcatccctaacctccctttctatactcagctaaaatgtcacctacaatacttcttccttgactccaccgtccccactttactgatatgaatacattttaataaaatgatataataatgcttagtttgtaaacctaatgttcctcaagtggtataattatctgatttgtatgtgatcatcaacccaaccatattaggagcaccttgaaggtagaagatttaggttcatgcttaacaccacatctggaccactgtggatttaactttctacaatgattgtattcattaatatattgggtgcccactatattccaagtaatatcctgcacactacgtacaaggaagcataggtcccgtgtgctcatgaaactgtaattttagtaagcagggataggatacaaactgagaaaggaaaacaatttagaaagtgggaaatattatgcacagaattaataaaaaagagaaaaatcttgaaaaagtcttcaatacctcacttggaaggtgattttgaagaagaactgatggacaaactagagtcagccatgtaatgatgtaggggcaaagcattccgggcacaagggacagcttatgcaaagaccttaaaaatgaactagctttgtatgttggagaaggataaagagaactaaggtatctataaggtaattaggaagaggatgagttatttagtcccttagtctttgaagcacattatctcatacttcaattgagtttattcttagtgtcattcttctggatgcaatatttgagataaatgtcttaatgaacgttcacctccctccgtagtaatgcctgagtgtcacaaaaactttttttgtttacatacgtagccatctaatggaaacataaaataggaatcaaaagttgagtttcatgtacaaaaggtaaggactgtacatgtggtcataacaacttcaaaagcacctgaaggtaacctttaaggaagatacaaaggctaggaaatatctaggatccatgaagacagacttacttaaggtcatagtgtgtccagagttggttcccgccggtgggttcgtggtctcgctgacttcaagaacgaagccacggacctctgcggtgactgttacagctcttaaaggtggcacgaacccaaacagcgagcagcagcaagatttattgtgaagagcaaaagaacaaagcttccacaacgtggaaggggacccaagcaggttgccgctgctggcttgggtggccagcttttattcccttactgtcccctcccatgttccatttctgtcctatcagagtgcccttttttcaatcctccccacgattggctacttttagaatcctactgattggtgcattttacagagcgctgattggtgcgttttacaatcctcttgtaagacgggaaggttcctgattggtgcgttttacaatcctcttgtaagacagaaaagttccccaagtccccactcgacccagaaagtccagctggcctcacctctcaatagcattaagaatatagtttcacgagcatatatgaatcaaaacttacatttgccaattttatttgcttgtttatgtgtttccaacatgtcttgtcttagggccaaatgtttccctagagaataactattccaactatcttagttgctgtatttttatgcaaccttcaactctccatactaaaatgtctccagaatagaaaataaatcttttcaaagtttcaaaagaggctctctatatattccccttaaaagtaccaggcagacatatttctaggtttctaacattgcgtgttgccaggaagtatatccaaaccatcacaagttattcatgtaaccaagcacacttattggagtgcttctgcttctgttcttgcttgaaattggaagctccttccaggaaaaaaaaaaaatatctatagaaggggaaaaaagtaattttactttgaaaataaaatatacgtgagcaatagttttattctgtttttaatttaccatagcttccaaagacaacattgttttatagtaggggttagcaagtgttttctgtaatgtaaacgtaaagggccagagagtaaatattttaggctttgttttctatactctgttgcaactattcaactctgctgttagaatgttgaagcagtcatagacaatagagaaatgaagatgtgtcattgtgatccaataaaactttatttacaaaaatggcaatgggctagttacggcttgagggctgcagtttgcagactctcacttcagagctaacagttgttgtcaggagtcacttgtttttggaaacctacaatgaggtactataacaccaaaaagagttatcccttcctttttctctctcactttttgaattatgagaagaattagaaatgtagttaatgataatgtccaaccagtgtaattatacttgttagaaacacagctggaagcctgttgtccagtcttatttctcctctgtgatcctcattttcagaggttgaagtcataagtttgccatgtctactttctgacaggggaattataataatgtggagtcaccttttgtttgtgactttgacaatgcttcattgacttactcaccaattttctaatttttatgaagactttttgccgaaatgtagactcagtcttctctcttgtctactctttctataacaattaacaatgaacttatttacctttttaacatctttttaaaaattttctatacaccttgaaaatgtgaatacaaagtaatgctgcatcatgtatattgccttattcacacatagcctcttatggtatatcatataaaaatggaacaatacagcaacaggttgaatgaacagtaatcaggtaacaggaaaatgagatgtctttaatatttcacttaaaaactcaatttcctaaagcatacatataaatatttggaagtatagttagaagaaaaatatctttaaaatattttaattgattagtcttatttataagataatttttaggaggctggttgcggtggctcacacctgtaatcccagcactttgggaggccgaggtgggcagatcatgaggtcaggaaatcgagaccatcctggctaacacggtgaaactccgtctctactaaaaatacaaaaattagccgtgcatggcagcgcatgcctgtaatcccagctactcgggaggctgaggcaggagaatcacttgaacctgggaggcggaggttgcagtgagccgagatcgcgccactgcactccagcctggtgacagagctagactccgtctcaataataatcataatcataataataatttttaggaagcatcagaaatatataagaaaaagattattttcttaattgctttactaaaaacacctctatgatttttcagtaaaacttgattcttatgtcatgtgtgagtgtgatctgcctctcttgggatactactgtactcatgaggagtgatttttttctccaacgacctctttgtcacgtcaacaggtcacaggaatagtgtaccctaaaaagccacctgccacatgctgctgaaaatgtaaaagtacacacatacacacacacacacacacacacacacacacacacacacaccaaaatcaggtatcacaagctgaaaataaaattgagtccaatttttttttaattgagcagttaatgtccttaaaacaaaatcctatactgcaacaaatacttagccagatcattctgatacctccaaactgtggtgtattccaagatacctctatgatctttgatttgatccacagcttttcagttatcatgcaaataccttcaagttttatctcatttctcagtgcaaactcattaaaaattttcagctgaattcaattttataaacatgttgtgaatgtcctctttatataagcaaggttgtaaggaactggccacataaacagaaaattgaataacatatggtttctggccttagtgatctcatgtgtgagttaggcatatgggcaaaatcagaacactatagagtataagtctaaaatggtagtattttataatagaggatgaagagggtgctgtgggatcataggtgacagatataactcccgttgtgggacttgagaaaggcttcacagtctggaaacatttagttgctattgaacacaaaataagactcactgttgagagaagggagagggagggcatttcaatcaaattaagattctgtggcatattcggaaactgatgtttttaaaaagagtaatgtttattacattcctctacataaattatatttctatgtaatatgaatgacaaatatttaacacaaaatgccttataacatttgaatgaaatccatcatatgacctgttatctatttccatttcctttttgctcatatcattatgaacaatgacctgataaattttttataagactttgctgaattagtaaaggattattaagtttagaatgaacaaagctgaccaatcattcaggcaaatttgaccgttttgttgtcgcttttcttatttctgaaaccatacaattccctgaaatgaataagtacatatttgataacttcctaaattaaggctcaaaacactggtaatctactgggctttcatttgttccttctatttgtctaatcctatctatatttctttatatgagctatgaaaatattagatttattaagttgtcctttatcttaatagagaagaatgtttttctatgacattaagaggaatttgatttttttctttaatgatctacttttaattttggtagagtagcattgataagatcaatattacacattgttaagtatgcattacatgttgataagataaatattacacttaaaatatgtttatcaaatgtatgaatgataaaaacgaattctgaaatgtatgggaaagatcttgaataaaggtctatgtacatttcaaggatgtctacatatgcaaattatcataatataataactattgaatatgattatcttcacatactttctttatttttcatctcttagatgaaattgggtattgttttcttatagctggaacaaagcattacagagaattcttagtgtgatttcattgaaactcactgttatatgagttcaacaaagtttaaattagtccatgacttaatcatcctttataaatcctatcactagtattcggtaaggacaaagtcaattaaaaaattagcaacagaagcattaaaagaaggattaataaatacaaaataagggatgtgatatctttacgtattgctgagatgttagtgctaaggaaaaacttccctgttcataatgtgaggtgggaaaaagaagaactattattgtatatttctcctctctaaaactgcctatctgactgtgtttttctgtgtcagccgtattaacagatgtttaattttactcactttagtatataaggcatcataatgtatgaactatttcaaaggccctatgatggctaattaaataaaaatatattaaatattagctggacaaaataaaatatgtattaattttggaaaaagtagatcaaggttttgcagatcttttcatatcaatatattcatttgctgaataagcttttattgtttaccaatattactagttttatagagatgtagatatcaccacagtatgactaattttatagggacacagatagatagatgttattttattccaatcttatttttacatataacaggtataaatatgcgcttgaaaggagtatatcacttaggagtcagtcagaaaagtaaagatcttctagtctaatacagtggttctcagccaggggtgattctgctgcacgctgagggataaattggcaatttctggagacatttttggttgtgacaattgcaggagtgttactggtattcatttggtagagacagagatattggtagacactgtacaggacacaggaaagtctcttacaacaaagaattattctgtccaaaatgtcagttgtggtgaggttgggaaacactggtctggaagaaggaatttactatgaggaactagttacgaaagtatagagacatttaacaagctgaacaaaggatagtgagatggctcagagattagcaactgtggcatgaagccactactacgtttaggtaaaaataagctaccatttattcttatagtaataataataataattattattattattatttgagatggagtttcgctctgttgcccgggttggagtacaatggtacaatctcgactcacttcaacctctgcctcccagattcaagcgattctcctgcctcagcctcctgaatagctgggattacaggtgtgcaccacccctcccagttaattttttgtatttttggtagaaacggggtttcaccatgttggtcaggctggtctcgaactcctgacctcagatgatccatccacctcagcctcccaaagtgctgggattacaggcatgagccaccacacctggcccactctttcttttttaattattgagaaatataaaaatatgtcaaaagtaacaggtgtggtggagttacagcatgcacataatgggatacagcccattatctaatctcagatggaaactagaaaaaaaagagaagatctttgctaaagcacagattatgtggaaaatcatttagaaaaatagcttatcacaacattaaaattaaatcctttagctgatcatttttccttgctattttttcttttaaaattgagaagacagtgagttttttttctttattgtcattatcttgatgtcaaaaaataatatgcacattataagtgggaaaaaagataagtcgaaatgaaatgaaacaatgcgaggaaaaaaatgtcacaacactcttcaattagaaaaaatgacccccatctttcctccaaatagaaatgacgtaactgaagtagtggaactttctcttccatggcaactctagagaaggggtagatggcatgggattgtggacagatggacacagaaagaggcctcatttattgttattgttaaaacttttacttctagtaatagtgacacctccttcagcatttctttatcaattgtcaatattttttggatcaccagcatcaccttctatatgtatgtctagaaacctcctgttatgaatttacacttctcagagtcaagacagaaatgctgtgaattgggcgataaataaaataccccccttttattgccttgctttgtctcttaaagaaagatgcctgttgggggactatgagaatgctttgtgcttctggacctcaagggacaaatctataataaaaattatgcatagtgatgagaaatatatataatgcaagtttgtagagatcagttaacttatcttgtctaggcaattatttctaaacaatgatttcaaatcattaactataatatagcccattcataccctccatttttgtcaaatccctgtcaccttcaaggacttggccatcccataggctgctctgcttttaatagaggaagatgctgtaactcttggtaccattgccagttatgaatttatccattaatgaacattgcatttaaggcataggtttatctccttctccaggtatgaacctgcaggattcctacctgaagcttaagggagaataaatccacctgggacaatcaaggacagatcaaccaatcagctcaaagcaggtgtgaattacacagtttatttgagtgacaaggtagctaaagcagggataataaaagaagggagtgggttgatgtggacagacgaactatggctttaggaaatttggtagggactgaaacatattttgtgtaatttatgtgggtctaatagcttttgaaacttgtttacaagacctgtgtaagtggtactggcatattcatgcatgagaaaacatcaagggaaaacttaatagttcaaggaggtgacaaagaagagaggaaccaattattttcactagccgtcaaaagcaagaaaataatcagcttgagcccttcggggaaaagataggttaaatattaagtaacagtttgttattattccaagtgttttcttaaagttgctcccatactttcctgttttctctgagggaatttagtttttttgttggtttttttttttttttttttataactgtcattggtcagagcttgatttgatgccagtcaaatttttttaaagagattatgaaaactgcttaaactcttccaaagggaagatgggtcattcttaacatgtgtttcaagaggaagagcataagagcattatatggtaaggctgaaagcagatatcagcgtttaggggccatgaagaggtagagctcacattggtaggatcattgactagaattccagagatcaaaattgtatgttagtctagcattggggaggacttgtagctagtatcttcattctagcttgggagcctaggaatcaggttaggcatcttgcacaggaatgggccgatgggctaaaatctccttgagagagatgattaatccaggacaaaccaagcagtcatgccaatgaattactttaacagggtacttcatatcctcatcctttgggcagcacggtcttcagagatggggcaggccccaggctgcagttgagattctataaactaaggtcaaaaagatgcagcagtgaagaagtcatgcttatcttgtataaatcatgttttcttttctttttaatgaaaatgtacatttaacacattttaaaactaaatattgaccctaaaattccaaccaaaaaatgctacataagtggtatttatttttgaatttccctcatgctcctcccactgtggggacaaggagtggtggtggaagagagatcttttagcaaacctgtgagtagagaattagaaggtaatgggaggaaggtaaaaggaaaacatcatagatggataggctcacaaacattaaaggccttcgtgcctgtccttcatgcctattcatccctctccagtatgtgaatcaatgtacttgttaaatattcattcacctcacatatttagcattaaccgtgtatcagggacgttgttagaccgttggtttacgatgatgtgtaaaatatcatttgtaactcagactaactggaagtgctcaatataataagatgtaatgttatggaacactaagtctgtgctgaagacttatctcctttaatcctaaaacaatcctggtgggtagtctcaatgatcatctccaagtcacagttgaggaaattaaggcttcaagaagttaagaaactggaccaacatcacaaaggtagcatcagagtgacagtttgatttcaaagtgtacttgacttcaaggcccacatttccttgcacgtttaatattgcctttctcaggtaaatataccattaaatgtgatacaactctaagcatttgaattacttacaacgtgcagagttaaaaccagcattatttacactatacttcagctcgtttataagtgaactattattttgtggactaacctatgaaatgtaaccacattgaattcctctgttaggtacaggtttggtgattccagggaatagagtatgactgaatgcacaggtaggggtgaagtgaacccggtcagaaaatttagagagcatcgagcagatcattaagcagctgtctttcaaatgtgcagaacacaactcatttgtaatctagggactatctgtattgattcttcccagggaagttacttatttttatacatatgtggtgtgttctgtccataataccattctacatggtaatgctcaactttattatttaaaaaaactgctaataatgaggtttttctttgtatcacagaagcagcaggagcaagttttctttttccttcccagtttttttaagtactgccaaggaatgtgattttgtcagacttgtatttcctattaagccaatctgcatgactgttccttctactagctttacctgttcactcatttattaattcatcaaatatttgtagagtgactattgtgtgccacatactaatataggcacaaggataaccaaaaacagacaaacgctgtcctttcaaggagctcatatagtaatgggaagttaggaaaggagaaaataaatatgtggtatttcaaatggaagtattaaagtgttaagaagaaaagagaaactaacaagatagggaaaaagtgacaggaacatgatgttttattttttatttatatatattttttgagacagggtctcattctgttgcctaagctggtgtgcagtgacgtgatcatggctcactgcagccttgacctccctgggctcagatgatcctcccacatcagcctcccaagtagccaggtctacaggcatgtaccacgatacccagctaacacgttttcttttcttatagagacagagtctcactgtgttgcccaggctgttcttgaactccggggctcaagcagtccacccacatctacctcctaaggtgctggaattacaggcatgaaccaccatgcccagccgaaattgatgttttatatatggcagtctgggcagacctctttgatgtgatatttgaacagaaatctcaagagagggagtgtattagcccgttttcataccgctagaaagaactgcccgagattgggtaatttataaaggaaagaggtttaattgactcacagttcaatatggctggggaggcctcaggaaacttaaaatcatggcagaaaatgaaggggaagcgaggcaccttcttcacaaggtggcaggaaggagaagtactgaggaaagggggaagagacccttataaaaccatcagattttgggagaattcactcactatcatgagaacagcatgggggaagccaaccccatgattcaattacctccacatagcctctcctttgacacctggggattatggggattataaggattacaattcaagatgagatttgggtggggacacaaagcccaaacatatcattttgctcctggcccctcccaaatctcatgtccctttcacatttcaaaaccaatcatgccttgacaacagtactccaaagtattaattcatttcagcattaacccaaaagtccaagtccaaagtctcatctgagacaaggcaagtctgttctgcctgtgagcctgtaaaatcaaaagcaagttagttacttcctagataaaatggaagcacaggcactgggtaaatatacccattacaaatgggagaaattagccaaaatgaaggggctacaggccccaagccagtccaaaatctatcagggcagtcaaatcttacagctctgaagttgtctcctttgactccatttctcacatccaggtaacactgatgcaagaggtgggttcccatggtcttggtaagctccacccctgtgggtttgcagggtagagcccctctcctggctgcttttacaggctggcattgagtgtctgcagcttttccaggcacgtggtgcaagctgttgatcgctctaccattgtggggtctggtggacagtggccctcttctcatagctccgctaggcagtgccccagtggggactctgtgttggggctccaaccccacatttcccttccacactgtcctagccgaggttctccatgaggtcttcattcctgcagcagacttctgcctggacatccaggagtttccatacatcctctgaaatctaggcagaggttcccaaacttcaattcttgaattctgtgtatccacagactcaacaccacgtggcagttgccaaagcttgggacttgctccctctgaagcaatggtccgaactgtaccttggccccttttatccatggctggagtggctgggacacaaggcaccaagtcctgatgccgcacacagtggtggggttgggggggggacctggtccacgaaaccatttttgcctcctagacctctgggtctgtgatgggaggagccgcaatgaaggtctctgacttgccctggagacattttccccattgtcttgcctattaacattgggctccttgttaaatatgcaaatttctacagccagcctctccagaaaatgggtttttcttttctactgcattgtcaggttgcaaatttttcaaacttttatgctctgtgacctcttgaatgctttgctgcttagaaatttcttctgtcagataccttaaatcatctctcaagttcaaagttccacagatctctaggtcagggtcaaaatgatgccagtctctttgttagtcatagcaagaatgacctttactccagttaccaataagttcttcatctccatctgagaccacctctgcctggacttcagtgttcgtatcactatcagcattttggtcaaaaccattcaacaagtctctaggaagttccaaacttttccacattttcctgtcttcttctgagcctcctaactgttccaacccctgcctattacccagttctaaagttgcttccacattttcaagtatctttatagcagtacctcactacctcagtaccactggtcttaactcctgcgctcaagcgatctgcttgcctccacccctaaagtgctgaaattacagacatggtccattgtgccgagccaaaattgatattttatgtatgacactctgggcagacctctatgaggtgacatttgaacagaaatctcaaggaaggggagaaattatccatttacatatttggggaaagagcattccaggtagaagaaacagaaaatccgtagtcttgaggaatgccgtgtatatgcagtatttttcaaacttgttattttgaaatacatatacacttacaggaagttgcaaaagtattaagaaagatcatgagtacccttcactcatcttcagctaatggttacatcttacataattatatgtaatatcaaagccaggaaaccaggaaattgatgttgatacaatctatgctttattcagatctcacatcttacatagctatgcacaatataaaaaccaggaaattgatattaacacaatctatgccttattcagatctcaccagcttttacatgcacttatctgtgtctgtcattctatgcaattttataccatgtttagagtcatataacaactacccctattttgatacatggtactgaatagttccagcgtcacaaaggaactatctcaagccaccctttaattgtcacacccatccaatctcccattctacttcctgaatcactagcaacccctaatctgttctccatctctatgattttgtcttttcaagggagttttctaagtaaactcatttggggaaagaaaggagatgaattgttctagccacggagtggagaacagagagtaagagtacctattgaagcagagggagtcattgcaataattcaaatgagaaataatggtgattctaaaccaggaagctttcagtgaaaacaatgagaggtacatggattctgggtatttttggaaggtagcactaccaggtttgctgatgaatggggtatggggtgggaaagaaagagaagagcccaggatgagtccaaggtggataaggtgaatagaattgagaaaatggtagaaggatcaagttagatggtagaggggtaaaggtggaagcaataattttgttttggaattgttaggtttgaaatcttgttagacatcccagtaaagtcacaaagagtgcagttggatgaaagtatgggattcagggaagaagtatgtgctagagatgcagatttgagagtcatctgtgtggaggtattattcaaattcaagtccccttggaatgaatggctattcaggcagggtcttcataaaaatgcttgttgcatgcctgtaatcccagcactttgggagtctgaggtgggtggaacacttgaggtcaggagtttgagaccagcctgatcaacttggtgaacccccatctctactaaaaatacaaaaaaaaaaaaagttagctgggcgttgtggcacatgcctgtaatcccaggtacttgggaggctgaggcaggagaattgagccaagattgtgccattgcattccagcctgggcaacaagagcaaaactccgcctcaaaaaaaaaaaaaaaaaaaaaaaaaagcttgttgcttcaaattcatgtcagtctgtaaaattatctgggaaggcagtacaaaaactgtcactttgactacgatgtttctggtgacccatcttcattgatcagtatggaaaaggcatgtctctgaaaatctctgagagtctttgatacagcaagaacataaggataaatcattcttctatgttcatggttgtagaggatcttgaatgtttaatggcagaatagccagatcacactctggcacttctgtatgagaggctgagggatgttactgattcaccccgagaaatatttactactaaggggacagaggcaaaggggatacaagacttcaccctgagctgtagcgctccctccttccctatcctgctttcattcttcacattgttttccttctttcttttttattattatactttaagttctgggatacacgtgcagaatgtacaggtttgttacataggtatacatttgccacggtggtttgctgcacccatcaacccgtcatctaggttttaagccccacatgcattaggtatttgtcctaatgctctccctcaccttttccctgtgtccacattgttttctttctttttgaagcctctcattcactaggtttcaatcctgccttgctagtgttctaactctaaggcctaggcaagttatttcaccgaacttagcctcagtgtcctcatctgcaaaatggatagttttatgatatcttcagcccttaaagtcaatggttctgacagctagggtgtactatcttcttggatatcagtcatctcaagcaagccctccttttttggaccttcttttcacacacttcacataccttagagaacataatacacatcctctttactcagggcttattctttataacaggcttcctaattcaattaactcaacttttcaaaaatattagtgactactgtgatgtaaataaatttgcattttataggggtcttagtaacccagaagggagtggggaaaattaatatatattgagagtttattaagtgctaggtactgtaaatattttcttgtatttaatcctccgagtaattctacaacaaagatattatcattgctattatgtaaataaaagaacaaagtagaaagaaacccacggtcttgtataagctcccctagttggtgggtattgaagggagtatttcaatctttggtagcttctgagtttttgttctctcagggaatctgccagatgtccagggcacctgccaaaccctatgaggctataagaaaaccattaagggtcttagattacccagctttttgggagttagaattctgaatgaaatttagtgttcctgcagctacaaaggaattgagttagggaagtgatgactttatctttagctacattggttattttccttataataatcctggcttggtagattagaggcagcccgagtaacccagaatcgctaaaatagaagtgcgagctcattgcccgctgtccttcactatgtttgcatataggaagcaagaataaaacaagcataaaataggctaactagcttgtcagagctcttcacaccaagtctttgtgagttccaataagacactgactattattaaaaagacagagactccacataagtaggaatttattgttttccttttcagtcaccaaaggacaatcctctgcataggttagcaaaaaatggtactgatcctataatctctaatattaaagtttagatttggcaagctgtacatcttatgttgttcattaacaaaaaacaatattgattggtatcttgtactataacttgtactgtgggtcaaattccaatacagcaaataccattgcaataacaattctacaaaactacatcaaaaaaacctttcatgtttgagccaacagcctgatagtgctaaggactttgagtacagtatgctagaagattcttaacagttatttgtcctggacaacaaaggttgactccattaaaaacatagccatcagtgtgggattatttccaaatcaagcttttggaaaagtcaaatgaaagtttgcaagcaggtggggcatggtggttcatgcctgtaatctcagcactttgggatgctgaggcaggcggatcacctgaggtcaggagttcgagaccagcctggccaacgtggtaaaacccccatctctactaaaaatacaaaaattagctggcttttgtggtgcatgcttgtaatcccagctactcaggagcctgaggcacgagaatcacttgaactcgggaggcagaggttgcagtgagccgggatcatgccactgcactccagcccacatgacagagtgagaccctgtcttcaaaaaagcaaaaaacaaacacgcaaacaaaaaaaaaaaaaaccaaagttggaatgcaataaatgttcattgaatgaatactgaatagggagtttcagctaatccactcaaaatagtgctgaatttccagctctaaggtcaatgcttggcatatatatcctgaaggaatgaatggacacagagtaattttttttctaaaatgcaaattcaattatgtcacttcccttcttaaaatccttcagtagcttcccgtagcctccagcatattattttgaatagtgcttctcaaactttgatgtgcatcagaatcacctggggattttcttaattaactgatgctgattcagtaggtctggggtattgtctgagattctgcatttctagcaagtgctcagggttatagcaatgattttggcctgcagaccatactttgggtagcaaagacataagccacttaacttgacataaaagactgtttagacccttagtttctctctcgctctttccccattttgagcttttgctccggttcatgtttttccctgaaaataccgtgatcttacattgtctgtctggatgctgaattttccctaattctgggcctccatgtagttttaggtttgacatcacaaccaccaaaagatttccccttctcccttaatcttggttaatgtcactctcatgtattatactgttaatgaagcattgaggacataaaacttatcaaatattttatcacaatcaatgatggcaccagtgataacatccaaatgcctgggtgagtaaataagaggagaataggggacttgttgttaaactaagtttgcagagaaaaaatgtactgattataattaaattggatgtttatttgttatgacaaaaaaggagctagagtcttttaatccaccccttggcaccactgcttatctccttgtaacatacgtttgattcccatgtctatttcttccatatgggaaatttcagctccctaaacatcaccaatacaacctgttgataagacaaagttaaatttattgcttactatggtaagaaagaccacagcctggacaaagctttggtagtatttcataaggagaaaggtgaggttggatttcattgggagtatgaagcttggtttaagattggtctttcactgtgggggcacaattaggattgggtaaggatcatggtattacaacttagtttggtggaaacagcacagtgaagatttctagccaagaggctcagagactattaaggtgtgaactctattgatgttttttgttgaagagttgatgggagtttggggaagttactttagtgaacagtcaaattatttgcctggccaagagttatctgtaataggaaagttatgctaatgaagacaatggaaaggtaaaccatgttaatgtcgacagccagctatgtgagcataaggggtaggtagctttggtcctccatgtccaaactgtttgtagtggtaagtgatcttcattctcacatagattgaaagcttcctgaggacagggcaatgtctttgtaaactttaaaatatctatgtcctgcacatcacctgccgtagacaagcatctagtaattgacggttgggtagatactgagggaaaacatgcaccaaataaaaatggcaataggacacaaattcactatcatttggaagaataacagtgttttccactgatatttgctacacacagtggggtccacagagcagcagtaccacttgggagcttattggaaatggagactctcaggcaccaccgcaggtccaatgaattaaactctgctttttttaaggtcatttgtattcaattattatttttttcttttttctttactttcgatgcatttttctttatttgtttttgagatggggtcttgctattttgccgagtctggtcacaaactcctgagctcaaatgatcctcccacctcagcctcctaagtagctgggatcacagatgtgagccaccacacctggcttgtatcacattaaattttgaggagcagtgctttaatatctattccattctcatcacttgatgaggtattattaattccacttatggatgtggaagttgaagccagaaagtttaaatgacttgtacaaggtcaaacagcttacaggtagttgagccaagaggctctcaagtcttctgcctccacaaacccctgttcagctgctgccctacaatggaataaaatatactaatcccagagggacaaatatgctaaaaatctcaatattatacactttggaaggtgcaggtgcattatctttcaattctaatttctctttcaagttttctgatgcataaaaatatgaacagcaggtctgagcaatgtttagatgccgtgctttgatccttttgccattcaagatgtttgatttgcattctgccaaggaatgtctggtaacctccatgatgcagaccacaccattagtcaagagagagctgacgtaccttcatctgagagctggctggctgtgagctgctcagagggaaaggatttctatttacaaattgtatcgattatttataaataaaagttccccttgctttcttcagttgtaaaatctgcagttagagagtcgggaagaagatcaaaactgcatacatttgcatctgccaagcctgataactagttccagaattacagaaatggtgctgaaatagcacctcaagtaccaggctctatcaaatttaatctatccataaggcaactgccaattatattttagagaaaaaatgtagactgaaaagatagacaatccaagtagcaactcctgtaaaattatatgcccataggagcaatcttgaagatataaatattggtatgtttctccttcatttatcatttatctgatcatttgacaagtatttattgaatgcctgttaagggtgtagatatatgtggtgaggctgcaggtgtaagtaggtctttctgaggatatgcatgaagttgatgttcataacttggagatgtgtgtatacagactgaggattccttcagtggatattaagaagtggagtaataggcagtaaagaatacactagtcagttgtggtacataaacacgtcagcaccacttaggtattaacttcctgttttgttttgtgtgtgcttaattacgctgtttattaaacaagcacatcataatctgcagatattgtcataaacagcacaataaagcctgccacatcagaatgtcatctatcaaattaggtgtgttcctcagctgtcccgataggcacacacctgtgcctgtaaataggcgcttggcggagattgcttccaggtgtggatctgttgggcgaccttgggatgtagggcactttggaaccttttcctctagcttcaggaattaacctctgggcttggttccatgccagcttgcattttgctttgggacagtaacatgtaaagaatatgcctgtgaatttagggttactgagaagtcctcatagaagaagtaaaatttccttgaggaatgggagtcttttattcaatccaggtttaatgcaaggcttggtgaacagctccagaaggttaataattgcgtgcgtgtgtgtgtgtgtgtgtgtgtgtgtgtgtgtgtgtatccttttgtcattcaaaagtatacgtatacacacacacctgtacagctgatgataaatatacattgtatcaatgagttcaaatgaagtgtgctattcattcactgaggaatgggctattataatgaactattatgatattagaaattgtcagggcaataagcaaataatacatacggttttcaacaaactttctaagtattgttatcagtgggtttgcttaaatctttttttacaaatttatttatttttttgagacgaagtctcgctctgtcgccaggctggagtgcagtggtgcaatctcggctcactgcaaccactgcctcccgggttcaaaagattctcctacctcagcctcccgagtagctgagattacaggtgtgcgtcaccatgcccatctaatttttgtatttttagtagagacgggttttcaccatgttggccaggacagtctcgatctcttgaccttgtgatccatctgcctcagcctcccaaagtgctgggtttacaggcgtgagccaccgtgcccaggcaatagccccattgctcagtgaatgaatagcacactttattttaactcattgatataatgtatatttatcatcagctatacaggtgtgtgtgtgtgtgtgtgtgtgtgtgtgtgtgtgtgtgtgtgttgaatgacaaaaggatacacacacacactcttattaaccctctggagctgttcagcaaaccttgcattttttactttcattacagtgtgtaaataatttagcaaattctaatttgaacctgatatcaattgagcatttaatatttagccaaatatttatcaagtgctgactgtgttctagatgctggggctgcaatttcgaaacagaccattgaggccctcatggagctcacaataaatgatcttccttaaagtatcaggtctctggtttgttaccgtattttttaaattgttaaggaaagaaaaaggccctatctttttgtagacaaacatgccctaagtgcttccagaaataatctccatcaggtaatgcagactgtgtgtggagtgaaattgagtccaatccatgatccagcagagtttcagcccaggatttctttagagcctttgctacacacaaagttggctgatgtgccattcagcatcccagcagctctttctcttcacactagcaatggcaaagctttgtgcggaggcattgctggctgctctgaactaaaagcatccgtggggaccgaaagaggtttttgcacaccttattaaggtaggcaagtgtgtctgagtgtgtgtgtgcctaaaagctggaagacatctgttgagaggaaagtgctcttctgtgggtctggcagcttttctgtaagtcttctattctgatgcaggagcgtgtgagcagtgggtgggaggagatgctttggtacttggaatgctgaggtccggattaagtggtattgtaatagctagttagaggcagaataaaaagctgggaatcaaagcatttaaaaatgcatccttccattatttgctctcaagttaaaccatattcattctaggggaaattaaaaaaaaaaaaaaaacacagcaagggcaagtagcccaaatctgtaaggtctttgagcttctctgttcgtccagcttttgaagtcttcctacagccaatttgtttggctcctctggagggggcaattcatatccacttccctctcctggagcatttctttcttctatactccatcagggaacaatagagtttaacagtaacaggcaattttttttttttttcaaagcttgtgccctcttctgcgtttaaaggtgttttttaagagactcctgctaggggaatcttggcgcctgtgtgttaagacggcaattaacttttagtatcagtgcttacattaaattttctctctttctgctttactaaagcagtcattaaaattcagtgtgagtaccatgaaactttatcataaaaccctgctttgcttagagaaccttgattgttttctgaaagcagccttctcagtttatatatacatagctgccttccttggaatatcaaattgctttgtgtcacattaagaaacactaggttgaacctctatactgtgttttatctgagaaaaatactactgcaaaaagtttgatttgttcaagttttaggatgaaaatttctttgtaacaagttatttgagttgcatactatgtcatcgtatatctctttagttcaagtaattttgcaattaacatacggttatgtaaagaagataatgatttattttttatttatatttttaaaagttattaagtgaggttttcctttcagtaagagtttagaaaaaatagccagaacaagtaactggacttggaagataaagatacctttgcacttctaaattttacctttgtacacttcggttgtgatttaatcattgaaatgcctctgctttgaagtaaatgcatcacttatggtgtatgctgtgttttaataaagggaaaacagttatgggttctctgttgcacatttgaatgttgttattttttgctgtatttaataacctcttttttctcttgtgaggtttactttggaaatgaggcatgttcaaaaataggctgacattcagcttctatgttttaaatttaaatgctgtctgtgttttatcacatctggaatgtgtggggagaaaagataccaagttttattatttagatttaattgtagaattgcagattgatatttttcaatgcattttcattatagtttctgccatggaggcagcgtgagggctttcaggaagatggagtggtgtaattaccaggtgcgcacgttcattaatccttcctggctagagaaagcttcaagttcttctccagtggcccattcgtaaagctataaatatctaaattgtgtcagccaagaagtcacacagaatggtggctctttttgagttcaatttcatgcactgttgctttggtcttgtgaggaaagctctgaattccttaggatagtcttggttgtgaagttccaaaaacaaaatatcaaatcattaaggatttaatttaaaatacatactcttctttcacaaactagatgattgcagtaatgtggattataaatttttttttttgctttatttctttagagctcctctttttattttgtatgatcaagattatagctgagattttggtgatttttttaaaaagatttatggcttatggtccatcagtctctccactacttcaaacctgtgtacccctgtatattatctgcagtactggaatgtttgcattgtatgtggaagctatatacgatttggtaaaaaataacacttaaaggtcttcgctaagagtgcttatttaatcattaaatatcccttaataaaaataattccagagatattgtctgtgtacaaacttaaaaaaagagaaatataaaatactgtgatgtgaataaaatgtatagcaatacactccaataataccattcttatgttttcccttgttctcaactgaaataactaagctaatagagacgtcagtaaggaatgtgttgtttcttcataatacaactacaaactcatctgataagaacaacctgagagtgaacgttaactttcctcattagaaagattcaatttaacacatatatacaaatacatttttaagataatgatatttgcagagtttttgtattctatggagtaaaggagaattatcacatattcaaagtaaaggtataaaatacatcttaatgttttacttaaattttaaagggtccaaaatatactaaaattgtttttctaattctttcctatgtttaaacgtgccagagtcattggaaataggacattctttttcttaagaagattttgcccaaaatatttaaaactattttcttttcccttgattttacaatttcaatattcatggatttttctactttaaaaataacagtagtttttatgatcttaaaacaaatgtttaagggcactttcgctctctggagactataccatccacatatttattatcagcaaaagaaagggcagggcatacttttatttgaagttgagtataaaaatgtgtctgtgtgtgagtgttattaaaaagataagtgaagagacaaatatagaatccaggaacattttcagcctggcttttactctctctaaaaatctaatgaaacccttgagcatctcttatctcaaggtacattaggaactgtccaacactatgatccgatgggagatcagtatattcatataaagaagaaaatttgttgttagtgaaagtcaagtcttttaaaaaaataatagttacagcatttgcaatatacaagcataatagatttactcaacgcccaccccccatctttaaaaaatcaatttccgacagttgtctactttaaaattgaacatatttgctacctggagggaacattgtaatgtagcccatatgtggtatgcatcctgaagaaaacctgaaattatagaggaagttatcctgccttctttcttctgttgaatgagttaaaatatattaacaatttgcctttcactttgtatttatcattttgtatctttgcatatttacatatacattcatgtgtacaagggcatatatactcacaggtcagggctatttaaacagctatttatttgaatatgccagggaaaatctccaagatataaagaagcagttattagatactatgtcagtatagaattaacagccatcttttttaagatggaagagaaaattaattaattacatacaatttctaacctcaagacattttctttctggagacaaggaatactgaggtgctcacgatagtgaagactcaacaagaccctaataaaatagatgaggataagtaaaactacaatagccaataaaaaacaaaaaacaataaaccatgtttcgctggcatgttggtgagtatctctgtaatatctgtcaataagggtctctgtagatttggagtaatgttcaggaactacctgtactagagaagacagtggagaggactccagtggctaaattctgctgcctttgcttccagaaatgtaaataataaggaggtattgtggcatttcctggaagcagtagtcttgtttcatggtctgactgtataagaatgcctagagaaacataacctcagctgactaaactcccttgatgattgtcactttgtcactgaactctgaccataccttttgcctccagaggcaaaagacgggtgaggaagtgatctcctcatctggtttttaaacaagtatataactagagaactggattatctcctaaacccactcttgtccctggaaaaaggggagtcatcctatccgtttcttagccaatttatgtatactcttagtttgagagcatgagaaggaaaactattttcttttcttaccttggctgggtttttaagaatttatttttagtttaatcaaaataatattttaaaaggtagtaagcctctcataagcagtttgatctgttctaaaataacttcaatttttctttttttaaactttcttttatcttacacacaaagtataatagtaatatgtactcactagaacaaatgaaacaggatggagtcacatagagaaatatatcatattctccctatcccctcccttaatattaacatttaggtgtcatgtgcttctccattaattttcattgcaaaggcctaaattttcttccaagagtgaggagtagcagcacggtagtttggacctgatatagctctctttccctagccttttgcttaagtgctttcctaggggctgactttacttacctaaagatgtttcaagcaagggctcacatttttggtagcagaagacacttactgattgctctcactaataattttgaaaggaatgtcaaaatctgggaggatcatgaaagaaatatcagaaatttcctttcagctgccattctccttaatactgttatcaataaattcagcatctcatatgtgatagcaaaaaaggtgctgccttttgttcttgcatcctgaggttcttacctaataccatggtagcaataaagatggtgagaaaattgcttcttctatggtgttcaggtcctgaacgagcaccctcacctccacagacggtggcaggtattcaagcattttacagactttggagttaaatatagcagtgttattctaatttaggtatgccaccaccagcggcaccggcaactgcaataggaaaaatgattggcaatgccagctatctgatgttttcatgtgccaggtgctgtcagttcttcacagtattacattccatcctcacaacaagagagtgccagtgagtgttgctgtgtgccagtgcccaggctaagggctttgaacacattaccctgttttatcctcataactttccacgttatttttattcctgaatgaagaaacaagttctctgtagagatgctgtcattgatccactcatatcctttcacatccgtttaacattttccctgctgtgcttttactcccaacaactagctccctaatcgctctgttggagggtggccttgaggctgccagagcctatttggtctgtgtaaagagagagatggatctatcctggaatttatgtccctgtgtgtgggaagcccttaatcaatgactgctggttgcagacacataaatacgtgagctttcttgttcccaactgagaaattcagaagtgtgaatggcactgccaccctgggcttttatgccatatatgtgtttggtctgtttcccttcccaatctcacttcattttcccttaccagtgtttcttgaaaacacatcccattagatcatttttgcatgaagcttcatctcagaacctccatttagggaacccaaactaagatattctctaaaatagaaactttattgataaagtttccaaactgtcttagtagatggccaatataagaccaagccaaatctttctgggtccaaattccctgtctttaattaatagactccattacaacacattcttcaatctttagtcagcaaacacttaccacgtgcctattttatggcatattatatttataccatagttaggatattatggttcatgaatattttatatctgtacacctgaaattctattgacctctctgggccacagttttgcatctgtaaaatcagcacaataatgctacttatctcatagagtagacttaaaaacgaatgaaatgatatatgccaagtgttgagaatcacaattggcaattactcatgctcattaaatattagctgtttttatgagtattgtttcattttcggtgcataatatcctatgcaaagaacaaaaggtattggtataggcattgaaacttgaagcatagaagaaaaagttaattaaccggtgccccactagatgcctctaactgctggctccgtgtatccctttagccttggctcgtcacgagaaaaccttggagacatttctgctggactcagcagatcaatttaagaaagatgaatgacatttttcttgaaatgtattcagtcatagctgcctttttctactttcatattttggagttcttagaaaaaattaaggactcctttttttaaagaaaatggtataaaagaaaatgcatatcactttgtcactttattattgtaacctcatcaaagtattcagtgtaaagacagtagccaagtgaactcttcttgtaatgctcggaaaccattttagcaatggtaaaattgctgcaatttatattcgtcaaattgcatgatttgacttattttagaaaagttattaacttctgaagagaatgcttcagaagcatttaaatgagtacaagttatcaccagtgatatacataaatttcatttcaaaatatacttctagaaactgtacttagttagctatagtatttgtacaaggattaattcctatttcattttgtaggaatttatttatgaatgtctatggcctgccagtgtaaagcagacttagagcatcatcttttacaataatctttttttttttaatcaaaggggagatattctggtaaaacaaaacaaaacaaaaacaatagtttattctgcatttttattaagtccctctgtaagtcatccctgaaatgggatatgtagagtcttatatttatttatttctcagaagcttattggaggtgatatgaaggattttaagaccctactaactaacaaaacaacaatttaaaattaattttcaaaataccttaacaaatcttattctccttattttcaaattctttaacaatgtttttcttattactaacataatatcttctgatgtagtcataataatatctaaaatgacaggtctaagtaacttacatggattaattgagtcttctaaatagtaaggtagatggcactattacttctatatgagaaatgaggaagtagaggtataaataagaaattttttggccgggtgcggtggctcacgcctgtaatcccagcactttgggaggccgaggcgggctgatcacgaggtcaggagatcgagaccatcctggcgaacacggtgaaaccccgtctctactaaaaatataaaaaattagcctggcgtggtagtgggtgcctgtagtcccagctactcgggaggctgaggcaggagaatggcgtgaacccgggaggtggaggttgcagtgagccgagatcgcgccactgcactccagcctgggtgacagagcgagactccatctcaaaaaaaaaaaaaaaaaagaagaaatttttttgagtgtatacagttagaaaatggcaaaatgggaattcagacccaaacagtaagactcaaggatacctttcttatcagtatgctaatatgaaaacctaagcatactagaaaatctaagtgccagttggaaaccagaattaacattttggtgtgtaactttctggctgctttttctatgctaacaaacatatatgacatacaaaaatacacacatacacaaattcctgttcactacttcttttatgttaacatcacaatgtaccgtacacagctgtattattttatatttgatttcatattttttctaaagtcagtgtatttgtcaaatatcaacttatctatttaataggaatatgggatgatctttgcttatacatacatacatatgtatataaaaacaaaatcaagtattttaagcgttcaccagaagtcatatgtcaatcagtaaagtatataattttttgctgccaatgacatatatcataaaaacgctacctatcatagaatgaaaatgaaacacagcaatattgggacacctattctcaagcaacagctttgtgatttattagctatctcacatgaaataactcattaacttggtattccaagcagcaaaagaaggatcacttaggtcacttgcaaaataatacaaagctaggtttaggggtgggttgcgcttggtgggatgtagatgaaaccatatgggcccttgagtttataattgctgggatctgcatggtgggtatatggatgtttattacagtatgctagtgagttaagaaagaagaggaattattattgacttacatcatagagtttatgcaaaaattaaacgataatttatttttaaactctagaggtataggtaccatcatgaagggacccacagaactgatgtagccagtaattattggagctggaacagatactctgctgtcagttgttctggttttgtggtcattgttcttgcctttgcaagttaccaactctaagaccttgggcaatactttaagtcttggttgtctcatctgtaaaatggggagagcagtaagtgtcttaaaggtttattctcatgttatatgacttacggtatgtaaaacatctgcgtttagacacatagagggtgcttaatggatgattgctctcattattaggctacatctaatctatgaatttaaaaactgtatagaaatatgtgacagattctttaagagccaaataccaactacagtgaaaaatacttaacacttgctgagctcttagtatgtgtcaggcttaactaccttaatgctcatagcaatcctataagataggtactcttgttatcctattttatatcttctaaaattgaagcaagggaagttaaataataggacaaagatcatacgctatctatccatatatacccatctggctgtctacctgtctccttccatccatccatccacttattcatctacccatccatccactcagttacttctctctctcccaccatccctttccctttccctctccctctccctgtctctgtcactctcctttacttatctatctatcgatggatcggtttatctatcatctatctatctctatcatctatgtatagttgttaataacactaacattttataaattacaagactgaaaaatgttttcattaacttatggtaacaaaagaccacattgtgaataaaaaaagcagtaaacacaggtctctgcacatatgaaagagatgtcctaaacaggaagagatgtcctaaacagtagggatacatagtatcatacaatcaaaacatggcagccctataaaacttacaaagcaatttcatgtaagttatttcatttgactcttaccacaatctatgaggttactatttttatttttctcattttacaggttaaatttaatatggcttccaataaaaaattagtatggttaataaatatcttgacgtcttgctcctataatcctaccgatagtttacagtaattagtaaaataaaataataggaaaaatacctttgatactagtattaaattataatcatatcattaggtaatttcaatttgtgattttcaagaatctgtaatatggtagcttcttcctactgacatgtttgaattcattttaaggcttataattcacaagtaatctatatattatctaaaatgtaaatgcacattcacatggagataataaattagcgtgaaatggctgtattttgctctctataatttttaacatacaggaaatcactgttgtctcaaaaatcaaggaaatatagtatttgaggtgaacttattctttctactattaacacattttaatatagttctctcacagtgcaacagagcaagaagctttcagacacatttgctgctgcaaggagcatgctgtgctgaacttaaaacaccttccctttcaaactccttgggactgtttttttccaagagacttcaaatgcactaaatttagcatccgttggaggcacacccaggcatattatagtgaaagccccaataactgaatgtgttaccactattcacaatgtttatgtgtgtatatgccttatctatgatgtattgcaaattacaaaaattgtgttattattcacagtaacaaaaacacttccagcaaatttctaacagtgatctcttttgaaataacttacatacatgtgtcatgggtcttaaactttgtcacttttatgtttccatcatgttgttttagccagtgagggttttgtttggttttcatttatgattatatactttcaaaaaatagatttcaaagtgtgaatttgattgattgattgactgattcattgagacggtgtttcactcttgttgcccaggctggggtgcaatggtgcgatctcggctcaccacaacctctaccacccaggttcaagcgattctcctgcctcagcctccctagtagctgggattacagatgtgcaccaccacgcctggctaattttttgtatttttagtagagacaggggttcaccatgttggccaggctggtctcgaactcctgacctcaggtgatccaccctcctcagcttcccaaagcactggaattccagacgtgagccaccgcgcccagcccgtgaattttatttttgaaagacaagaatgtccttgcctaattgcataatagtttaacatcatgaagactaaatatgctttttagccatgacaattttatttattattgttttcatttttaattttctcaaagatcctcatcagtgtactctttttggtcttccttataagcgtattttaacaggacataataataagataaatcccaactttttaaagttgtatccgtatgtattactttaaagtgctattaatataaacgaattagaggcaacttttattcaatcagattttaagtaattttaccaaaaatatggccttgataatgtctctgtaacaggttctctgtaatatacatgctgaggattggtttgtctttgcttttgatactattttaattagaaaagtaatggggaatccagacccttctcatttaataatccagagaaaaatcagtccatgttctaatagtttaaatttttctactaaaacccatgtgagaatccatatgagtggaatggagaggagttcagcttcaaagttggcagatttgagatgattctatggcaacagaaatgtgcttgagggaaatcagttgcggcatcttctataattgtgtcacctagattttgccttaggaatttctagatttccatagaacattgtgacctcaaatgctttatcttaataaagaaataaaagcagattagaagaattatttgcctacagtttgtgggagatgggcaagtcttaagagtttattaggtacccagaacgaaacatattttcttgggcctcataatcacattgaaatacaaggatttagttatacacagtgaccagttagtgaatgacagtcttcagtatctagtagacagtaaacatataaagatgtatttgtggccgggcacggtggctcacgcctgtaatcccagcactttgggaggccgaggcgggcggatcacgaggtcaggagaccgagaccatcctggctaacacggtgaaacctcgtctctactaaaaaatacaaaaaaaaaaaaattagccatgcgtggtggcgggcgcctgtggtcccagctactcgggaggttaaggcaggagaatggcgtgaacccgggaggcggagcttgcagtgagcagaggtcaggccactgcactccagcctgggcgacagagggagactccatctcaaaaagaaaaaaaaaaaaaatgtatttttacttttaactacagcgagagaccctggcagcctacagcatacaattagtgttcattatttagattgcatggatttaatgtgaggggtcaattacttgtctaaccagtgagcctagcctcttgctcaatactgcctgcttcatgagggtgaactgtgctggagaaatatattacaggattatctgcagattttttttaaatgagtggttaagtcaaaagttcttgtgaaaattcagagtaataaattattatgaagttgtgtaactaggtaaaggatagtttcttttacacgggtaaagattaacatgaggaggaaaactttagcaatggcatttaattccattcaatatatttatattgagctcctttaaaaatacagggccttgtggtgggtgctgaggacagaacaaaaaccaagtaatacatgaacataacccttgatttcatgatctagtagacctataaaagttgtcgatatctgatgaaaagaaaatggtaaagatattccaaacagtgtatgcaaatccagagataggatggaggggctctacctgaaggatgatgataagaaaaccgtgttgagtgaagggtgatttgtggaattcagataaaatatcagtcttgaatgctgagtgaatactcaatgattgactagatcccatggacagtaatttcttcaattatgacgatgctagtgtttatgactataactatcattctccatgccaggcactttgccatttggtaaatgtatagtgtgctattctaacaagcatgcacagagcttttactttaatgtatccatgagtttattggggttcagaatttaggtaagctttgcaaggtcgtagcatggagtaaaatatctgaaattcagacccatatctaactaagttcaaagactgtacagatatttctcctcctttgtgcagagaaggataggaatggttccatattatcatggacttagtcagatgttttaaaattataatgtcctgtgttaatgaagaagggatgatattcagtgcatattcttaaccgttactttgcttaatgctctcgacttttctgtgagatggatagtgtagataaaatccccaaggggactcagcaagtgcaagtaaaacaatgaaactttaaagccctttgtcaaaacctctctttttctcagaggatggaagggccgtaaaggttggtgaggaaggatggaccatttcctatgtagtcttctgacaatattcaaacaaaaggagagtcagcaaatcccccttgatgtgggaagttttaatacaatttgcagagtgtctctctggagtagacatcctcctctgcaatcgtgtcttctatatagcctcagggctttgggtaggtaatcctctccaaggagagtcctggagagggctgtctaccccccttgcaccatcctctaacattattctatagctcagctccttgtttctgtttcctgccttgtttttgtctgagtctgcaattatgatgtaagcaccatgaaggaaggtatgttgccagtgtttgcatcagcatatcccccgtgtgtagcagcgcaagggatatagtgagccctcaatgtctatttgtagaaaaaagaatgaacgtatcaacgaaatctgatacatattcattgtgtctgttatctccatctctcttgtcctgccttgttatcttgccattttcacaaaaggccccaaggcccatcatttcttgtgtaacttccagagtgttaatttttaaattaaaattaaggctttctacatgagtgtctattatttgagaaaccatgcaagatcgtgtgtgtgtgtgtgtgtgtgtgtgtgtgtgtgtgtgtgtgtgtgttgcactctatattatattgaattctggattttttcttataaataaaattttaaaaatagttctttaaaaataggaataagatgttttaggaggcacagagagcaaaggagaataaaaattgcaggtttggggttgtgcatactaattgccattgagtaaagagagcacactgaggccatttagaagagaattaacgtgttttgtttttgtttttgtttttgtttttgtttttgtttttgttttgagacggagtctcgctctgtcacccaggctgaagtgcagtggtatgatctcggctcactgcaacctccacctcccgggttcaagtgattcttgtgcctcggcctcccaagcagctgggattagaggcgcccacaaccacgccaggctatttgttttttttttttgtatttttagtagagacggggtttcaccatgttggccaggctggtctcgaactcctagcctcaagtcatccacccgactcagcctcccaaagtgttgggattataggtgtgatccactgcacctgaccttatttttattcatttaaaaatattaaatgttactgcatagggagtaatgggcttaacaatgaggtgaccaaaactcctatgtaccatgcagagcaatgtatcaaatgtttttaactataaacttctcaaaaacataaacctaattgttctgcagctgcaggttatatctgccttgtttgagcaaaatttggtggtgaaaatgccttgcttccatttttccttcaataactgatatggtttggctgtgtccccacccaaatctcatcttgaattctactcccataattcctacttgttgtgggagggatccagtgggaggtcatttgaatcatgggggcggtttcccccatactgttctcatggtactgaataagtctcacgagatctgttggttttatcaggggtttctgctcttgcgtctccacattttctcttctgcttccatgtaagaagtgcctttcacctcccaccatgattctgaggcctccccagtcatgtggaactataagttcaattaaactactttttcttcccagtctcaagtatgtctttatcacagcatgaaaacggactaatacaataacctatataattttgaaaagtacttgtctaatagactttcacaatagaaactatatccttatcaactttgaaaagtcattgcttaatgcctttggataactgaattttctaagattattttaattttgaaagttaaattttatcccagtgttgacgatttttgtatgctacttttaaaatattttgtcagtgatttatatctatggtgcaatcttgtaaaaaattaacaatgcaaatgtggctagaccatttaaaaatcaatatgttataattcagcccatttaatcactttagttaaacatcttaggaacaactcagttccatttgagagaagacacagttttctagatgtgtgttgtggcatcatattgctttacaatatcttacataaggtgaattcaaatcatatcattgaatctgttttaaattctgtcatagcttaagattagtgactaaatattggcaggtttatggaagtaggatgtaaacaagacaaaaacaagggtggaacaagtaattttagtatattattcacttgcacagagaaaagtcattcacaccttcttcagctttgtgaagaaaatagactaaaatcctgttgatatagcaactatgttttccgtttcttgtataaaaataaagaaaacttcctattaggaattagccagacattttaattttctctcttctttctctattttcccttacagtctctttgaaggcaggcaaaatttctataaagttttaagaatgttttaagatttttttattgtgaaatattcatagactcacaaggagttgcaaaaacagtacagagatttcctgtgtatacataacccaactttccccagttacatattaaccaaatacagtatattaccaaacccaataaactgacattggcacagtgcaatcaactagactgtagaccttacttggatttcacctgtttttgcacatgctcttttactgtgagtcattatctgttattctatgacattaaccatgtctatagatttatatagttactaccactatcaagataaagaagtgtttcatcaccacaaagtaacttaaaggattatttttataaagtaatgacaaatgtgtcaaaagccattcctgtgttatatagcaagtatgttttgagttattaaaactcactgatcatgtctttcagtgtcataactttgggtttccctccctaactataataatcctgatgaattacagttgatgaatatgagaatatccaactcttcctgactctataaatatattgactgagattgtaatatttatggtgtcttaaggggcgcttgttttattatgatgatgtgaacatgttgagaatagtaagaacagcccagtttagcaaacaggatatgagtcttctatatccagctcaatcgttgccccaacaggggacatctgcctttgctacttaattttccattctggaaaatgtgaagtgtatgagaatgaataatcgtctccgattttccagcacataataatctgaggagagcaggtacagcaatttaggagctgttttcttttggtttccaaaaaaagttccgtccagtggtctaagttagtcgtttactaagtgatagagcaattggctatgctttttgaacggactgataattatgtggatgcagcaaataggatatagacaatgcatctactccattacagtaaaaaagactctgatagcagttaatccacataccaggcacttagcttaggcacagttggaggaaatggaatggtaatagactgtagtatggcatgacaggagctgtagcttgagattcagaattccaactctgcctctcaatatttgagtcctcatggccaagatatgtaaagtgctctgtgcaggtcttggcaaccatccaccacacacttagtatgcaatatctatctttattagtcaaggatctggaaagctagttgatgagacaaatgatagaaacaagagttcattagatgaaataaagtaataaatgatgcaagaatttaaaaaagatttagagaaggaaagggaacagaactcacatgcaagtagagcaactgtgtatcagataatgtgctagctgagttagaaaccatgtctcatattaccctgaaaataattctgcaaagctgtaggtgttatttttttcatttgacaggtgaattcatgaaggcttgaatatagggttaagtgagttgtttcaatgtagttattgattcaaatcaagatctgaatgactctaaatatggtgctatagagatttgaagtaggataaataggatttgaaaaaaagaaaaaatatatagggaaaggaattggtacactgtagcagtgtcataaatgaagcttcagttgtgtgattccagatgatgtatgtgaggcctaatcaaacagctttgtggaatcaaaatttctgctcttgtctccaactggggacgagttggctcgggattaaggtgggcgaccttgggaagactagagtctaagcaggactttagtccctcataagaattatatgaggatgtatatttgcatacaaattcctgggcccaccgagatctgccaaattggaatgtgtggtgatatcacccagggaaacatagagagctgttataattagtcatgaaatatttagtactgaaattatagattatgttaaataatcacttataggggacatagcagggttggcaggttaaccatacagcaaacagggttgtaagtcagggcctagagaattttcaagaggcaggaattctgcagaatgaaggcctggtctcatgcagcaccatggacagctccgaggcactcttgtttctccaaaaacctgaaatcaaaaactttgcttttcatcatgcaacatacccatgtaacaatcctgcataggtactccctagtccaaaattaaagttgaaaaaaaaaactatactttcatttgaatacagttctcttcggctttaccagctctactctggaaggaatatcttttactcaatgaaaggccatcccctgttaatgcctggccaggttctccttatcagtcattcactatctttgtgtgtgagtgactaaacatataatgctatgtttagtggatggagtaagattacctttgcagaggttgtactggcttacccctttggttcttgtagttttcttctattagagttttttccatccctaggtttctatactgttcaaatgggtttaagattcttgaaggtattcctctgaccttgtaatttatgcttgtctcctagcacaacttttttttgtaaaggaggcaccaactatgtggtttgctggcgatggcatacacaaatcaggtgggaggaattaatgagagcagcaattccaatatctggttcttcaagattaacttgtatagtttaattcagcattctaaataagcctcatagatttaaaaatctagaataaacccacatttttaaaaaaagttttatgttatctgtgctgataatgcacgctgtacataataaaatattattttcttttttttaaatttattattatactttaagttttagggcacatgtgcacaatgtgcaggttagttacatatgtatacatgtgccatgctggtgcgctgcacccactaactcgtcatctagcttaaggtaaatctcccaatgctatccctcccccttccccccaccccacagcagtccccagagtgtgatattccccttcctgtgtccatgtgttctcattgttcaattcccaatattattttctaagtggcagtggaagaaacatggaaagttctacttcatccatcggtggattagaatttgtataccatgagatgattaattttcaaaaccagtttgaatctcacaaaataatgaccctgttttttgaaggacaaggcagaacaaggaactaggctgtgccacgttcaagtcacaatctctaacatttgttttgttttgttttgttttgttttgttttgttttgttttgtttaatctctgttgcttgttcactttctcttgtaatctgcattgatttgctacctggctatttgtagattgacttcggctgccaggaatggaatgtttttcataaaggaacatatgccttaatgaaagtaccataagaagggagtagagtgtgaccaattgcctaggtaataagtagtgacaacaatgatattattctagtataaatggaatcagtttttctttgcccagggggcatgataaagaaggcctggctggtatatactaggtgggacacaccaacagtgcctagaatgtcaatggatcaaacctgagggaaccagaagttgaaaagacatatcccaaaagaaagcatttgatgtttaagggttggcttacttagaacacaatgaaaaatattactaaaattaaaactatgattttagctatttttaaatatgacaaattaaatagcagaacattttaataaaacattacttaaggtccacaattttctgtaagtctaatacatgggtcattaaaataaaaaattccccatgatttatggaatcagatttttttaatacaacgaattctaaatggttttataatgccaattccaattaatatcctaattataacatgtcatccagaagggttaatgactaaattttattaatatttgttttctatttattttgatttgtgcagtttatgtgtatagtaacgatagctgcaaattagataccattagcattaaataaggtatatattttaatagaaaattaaagttaagtatttgagctagcctaaaatattcaacaacttaaatttgttttttgtggatcacatttttttgagacaaagtcttgctctgctgcccaggcttgagtgcagtggtgcattcatggctcactgcctcaaccatccaggctcaggtgatcctcccacctcagcctcccgggtagctgaggctactggcgcacgccaccatgcccagctaattttttgtatttttttttagagatggtgtttcaccatctggtctcaaactcctgagctcaagcaatctgcccaccttggcctcccaaaatgccgagattacaggcgtgatccagtgcactcacccctgtgaaccaccattaaatagctaataaaagatgcatgtcaataaaaataaacaacttactagaatgattatgtgaaaatcatttattcttccaaagcatgaattttcaaacacaccttttgttactgttttaagaagggaatcatttccatatatttgcatgtaaatcacttttagtctcagagaactttccataaaagtttttttattactgctgtaaccgatagagctagtggactattaatttaaaaagctgtacataaaaacacatctatagctcaaataatctaggataccttttagtttggggaaatgtagatgaaaatgaagtaattacagaatccttgttaattttcagatttagacagtctaggcaatatctttcaggaatgaagagatatgtgttttttggcatcttggtagagtatattcccattgtaattcttttgtgaagtctagaccagatgtggccataaaaatagacccctactacaataatatatttcatagataatccaataaagtcaaatcttattgcagtaggcttagaactctgtttgcacccatggaatttatatcagtttttggcaaatcctttcatctctgaggatactttttcatctcacatataccctattttctgaacattttgccttcaaagtatacctcatttatcaagaatttctctttattcatctgacttatacaagtggcaataacaacgtctggttcccatgaagtaaccagtgaccctttgaaataatatagcgctggaagaaagaaaaggaaagggagactgatcattcagcaactctttaaaaccatgtcaccgttaaacacatagtttattttatcttttttttagaattgtgaaaacctatattagcatcttcacggatgtctcctttgtttacatccccgcttctgtgccttgcctgcagtagaaaaaaaaaggacatgtgtatccctattccccattgtcttctcattctacatgagaatgagaattcttttaatttcttctctatctacatgaacccacttccattatctgtttgttcagttctttaaatgccctgaagctagctctgtgactgggcagttgaaagttctggacttagcatcaggttaatttgaaaaatacttattgagccaccaccatatgtcagccactactgtagatgttttgaatgtgtcagtgaacaaagcagaaaagatgtatgccctctggattcttgggggtctcaaatagtgaaagacagatacgataagtatattgtatagtatgttcaaaagtgataagtgctgtgaaaaaaaagaagaagggtaaaataagagatggctcatgctggagtacattccaattttaaatagggtatcatggtattcttcattgagaaggtgacatttgagcaaagatctcaaagaatgaggcatggggttgaatcatgtagatatcagcagtaaactcattttgggttcagtaaacagtcaatgcagaattcctaagccatcggtttatctgctgtttggggctggttatctgcagtgtggctagagtgaagtaagtgagagaggtttaggagagaatgttagtgaggtgagggtggacctttgaagccattgtaaggacgtttttctctttctaagtgtgagaagatgatgctgactgagaccagggtgataagaaatagtcatattctgaacgtgtttggaagtggggccaacaaggatttctggatgaattggataaggggcatgggagaaaaatggagtcatgaatggctccaacgtttttgctctgattaactggaagggataaagttgccctaaactgaaataataaagactatagatagaatggggcgattagggaggcattaaatttggatatctgttagacatatcaccagatatattgaataggcaattgaataaatacctttagagttcagcaaaaaaggtccaggttggacgtttaaatttcggaggtgtttgtataagataacatttaaagctgtgatatcagattgtatcactaaggaagaatatagatagaaatgacaacgtgactaaggactctaacattaagaggtggattgacaaaggagaaaacagcacaggataatgaaaaggaatgatcagccaggcatggtggctcacacctgtaatcctagtactttgggaggccgaggcgggcagatcacgaggtcaggagttggagaccagcctggccaacatggtgaaaccccatctctactaaaaatacaaaattagctgggtgtggtggcacacacctgtagtcccagctgctctggaggctgaggcagaagaattgcttgtacctaggagacagaggttgcagtgagccaaaagattgtgccactgcgctccaacctgggcgatggagcgagacttcatctaaaaaaaaaaaaaaaaaaaaaaaaaaaaaaaagaaaagaaaaggagtgatcaatgagatgggaagaaaaacaaaagtgtgtggtgtcctcaaaaactgacgttctattttcaaaacctacattttgggtctccttttactatatcctgactttctagctatataaccaaaaggagaaagcagtaatttttttagatataacatgttaataactctaagggtattcaatgaatctgaataattcagtggtataatgtgaaaaaatatagtattcataggaaaaggaacagaagttagctcaggaaatgacttgaatgaacaccgaagccaaatctccagcgcaggtccacgtattatttgtctcagtggttgaattagcagcaagattccttagtaggatgaaaaaagatgttgtgagcatctgtatctacatgactgaattaaattcctccaacaatgaaatgtagttaacgtagtatctcgaaaagaaccctaagtggaattcagggaacctaaattccaaccatggttttgctgctgactgattgcattcacttcaaatctatcattaacctccttgtgcctcattatcctcatttcaccaaataagaaaaatgaaatattcctccttccctacctcactaggatgttgtggatttaaatgtgtgagaagtgcttgagatgcataaaatttgatggagtgttttattcatgaattcaaggcatctgaagtaatttgaccatgatggacagttgcttccttgcacattttttagagtgacatttccgttactgacccacccatttatgcaacatgttgcctaatctaaatttaggtcaaaacaaattgaccttataggtaagcattatatctattaatattgtatttttgtattattttataatattcatcattcacctattttctcatgcaatatatgttactgaacacatatagattaaaaagccttcatccctaaataacaatgatgggaccttccatttttatatccctctggcatttaaaatgtgcttttatagccatcatctccattgatctctcagtcccttgaggttgatatgacagatatgctttttccattttaaaattacggaactgacagtctcagatgactttaccctccaactactgtgtgaagaagcagggtctggcactgaggtcttctgacatccagtgtagagcactatacttcacaatatggccattggcttactttattacaagcactaaatattttccactgaatacgtaatacctagaggagaatgtcgtgtaaaacagcagcagtagaacagaggattaaatgacccattttcttgaagttatcttagttttaaagggttttttcttcatcactaatgaccatccctgactaagaaattattctcataatacatgataatatctgcgttttccaatgcgacaagaatgttaggatgtctatacatgatcttgacaatccctagctccatcacaatgtgtccaaattcattttatttggctagacaggcatgtagtcttactttcaatggttggctctgctggatgctatgtgatctagaacctgtcacttaccccttctaaacttcaggaattttttatccttaagataacaagaaaactcgtacctgtttcaaagagctgtttgttcaatcacctatccattgattatcttctatatgccaaatgtttttctaggtgctgaattacaggaatgaatcagaagcaaaaagttcttactctcaaggatcttatatgctaatgaaatagatgttaaaaaataacaatttttgtttcattttattttattttattttgttgagacagagtctcactctgtcacccaggctggagtgcagtggcacagtctctgctcactgcaacctctgcctcccgggttcaaatgattctcctgcctcagcctaccgagtagctgggattacaggcatgcgccaccatgcctggctaatttttgtatttttagtagagatggggtttcaccatattggccaggctgttctcgagctcctgacctcaggtgatctgccctccacggcctcccaaagtgctgggattacgggcatgagccagcgcacctggcattaaaaagtaataacaatttttaaatatcaatatgtcttatacagaaaagtgagcagtgtggtagagtgtaactggaatgtgagttgagacataacaccagacagagaagccagagaaggacttttgtttgaggaaatgacatttgaaaaggaacctgaatagtgacagaggcagatacctaaagaatatgttccagacaaaggaaacaaaaagcgtgcaattgcatagtcaacttagcctacttgaggaaaagtgtgagtggattttggtgatggagaggtaagtgccaggagatgaagggagagatctggcatgcatcagatgatgtgcagtcttccgggacgttgtaaagagttgggctttttttgtttataaattaaatgttaagccattggggtttttaaccagaggagttatgtgatatgatctatagttaaattatgtttgttcttggatggagtgtgcattatgggaatttatacagaaacaagatttcacatatatatatatataaaactcagtgtcaatagaaaataataaaaacaaattttatccattgataattctggcattgatagtagtgggtatggtggtaataattgtgtgtaacactcaaactttctgaaaacctacacttgatctgtaaatccaaaagtatatgtagcaaaagccataatctgctcttatttctgcaccacttgcaccagtgtggagtgataaggcaaattattcaggcacctgtgtaagccttcagtgtcctcacccccttgttataactctccactaatattacattggtaaagacgtccctgacctatatgtcactgagacctcaaagaaaagagcaaagctaaagcgtaagggggaaaaaagccagcttaaaaagacttaaaggtttctgggaccaaaaaaaaaaaaaaaaagtctttgaaaaatgagaaaggaaggatagaagaaaagattctcctttggtcaatctggccaacctttggaaataaaaagtattgtgttgcagctaataactatttgtcactgcaggcacttgctgatgtctgccctttaaaatgacccaaactcgttggcctcgaaatcagaagccaaggaaaaaatcttggacataatgttttctgtagaattaccaattttctctctctctctctctctctctctctccctccctctctctctctctctccatatctatatatatatagatgtatatatattttttctgtaggaactaccaattcctatctatagggactgattgagaagtcccttatagcagtttttctttggcttttaggatgcaatgattattggtgagaataactctttcatttcacatttgtcattggcttatttgaatgtaatcctgattcaatcgttatgatctcctttaagtaggaagagaagctggtattacattgtaggattttaattttgtactcatgaaacttttgaaaaacattactcatactcttctgactgtcaaattggcctctaagaggtccacatctcaagaggtatcaagcattggtaactattttttggtgttgttttctcatcataaaatgtacttttattaggtgactttggaaattttattgaatcaatgcatgacactgcctcattctagtaatctgatgaagcaaagctgaaaaacaaaatttgaggattgtcagtatatatacttttatttgcagtcaagagttatgctgcaaaaatggtttattgaagtaacaaaattttagctgatatattaatctgaaagatacagtatacatttttagtatggaaaagatgaggaaaaggaggttctctttcctctaggtatctagagcaaactgtaactgtccttggtatttaatttttggctaaggtactgagattagaggtggggccttagatatgattaattgtcagactgataagctagatatttcattgagtttctgttgtgctctttctttcagatcctctgttcgatgctttgttataaagatttgggcatttcaaaatcttctccatatctggtgtctttccaaacagcaggtcatagactttacacaaagaggaacgacacaggttataagtagaagtgttttaaaccctgagttcctatttcagttttgctttcttaaacatattttccttatgtgataaatgcgagtgttgaatggtgataaataccacccataggctttaaagcctaaatgttgaatttgacactgagagtttaaaggcatcatgaaaatttctccagaactaatgttcaagcaatttaggttttacaggcaactcaatagttttgaatgatgtagttattttgaaaaagtcaccataaaacgctatgtttagggaattggtactttgcatttatcagaagattgtaaatgtcaatcgattggcttgctatttggaatataattttttaaattatagttcaaatcattaggatttaattcatgattttgtactacaaactaaatctatgaaaaatatcagatatttattttaaattagaggcatgtaaaggaaaatataaattttgaaatgccattttactggatttttctcttcagcccaccctaggcatttgttacataaaatatttctgaggaagtcttccactgattttgtaaacaaacatgttttattgaacagttctttgttgactagattaacattgaccattgtatgcaatgcattctcaaaatcttagaagctggttttctttttaatcatataattttacttgttttacagtgaaattaatgcatgtaaaaagtatacctatatagaaagttaaaagaatattgctaactagttactatacttccaaattgcctattttctgtgtcttgcattggacagtagtgattacctctaaaagaaaatggatggtctttgtttcattgaagggatggataatggacataactggcattcttgagcaatgcaattgcaaatacatgtctttgcatttatggtccaatcatcttcttactatgatagcatataattgaaggttcaaataaatgcctcgtcccttcctgtggcatattaaagagaaagaaaaattagaaatactttcaaagctacctcacatactaatggtagagttgtttgagtatttaggtgatttaacaaagctgatgtattttattatgcttgatcattgaggaaaatttatttatcggaatgcttttgagagcatatatattgtcagagataaacacagctggatattaaagaggtaaaaacagattttattcaatacctcgtgaaattaggggagagctgagatccattctaatttgtgcagaggcgacttggttgttttaaggcaagaaggagggagaaggagtgggggttcattcgagttagagaagtaaaaaagtacaaagggctggacagtgtaaatgtgattaggccagctgtgttagctggaagttattgaagttaggattctatcttcccacagagaacaggagacagaggacttatccttcttgatgatgtcatttgaaaagaatggctttcaggtccttgagtgagagacacttctgatttccaagagctacatgttcacaattgtaagcccttttgagtaaatgttctaagaaacggaggtaagagtcctatcaacagatgtgtgttggctagaacaaacattaaattttcctggcagcactgagctttctcaagcaggcacttaagggaaggctagggtcatcctagggacatggccttctggggctagaaaccatactagagtttagtcaagtcttagtgcaagggtttggacagagttgttaagtgctgagagttctgtatttctcactgtcacaaaggaagatcagaagctcctgatacttttttcatcagtacaattgaatatataaatcctatacacaaaaataaactaagcttatacaagcatattggtcaaggaatgttgctggccttattaattagatagcccagttaaaagaagaattttttaatataattaatgttaaagtaggatgatagtatataaaacgtgtctactgtcctgaatacaaactaaactgtttggtttagcatttacctcaagatctcttaatatcccccaaagggtccctaaaaccacaacttatctttgtgctcatgaagtagagaagagacagttaatagacatttctagctgatagactgttgtagagcagagaacgctctgtgtttttgaaaattaaacatatgaatttgcccctcttcccctattaaggaagaagagtttcttaattgtgcgaacacatcaagtgaactattcaattagatttttgtgacccagggtataaacatctggttaaggttacatatttcaaaggaacaaaacactagaaactcttggttttaaatctcatggctggaggataatttgcagcagagatttatctggcaagcatacagaattgctgagactgttctaaagatgtaagtgtgggtgtttgtgtcgtgaaaatagctgtttacatctattaagtggataccgatggttgaaagtgccgtctatgtcaagtttttaccaaatcaacttttgcctcactgtgtcagaccattttacctaatcaacttggactgctaatgtcctttcccctggcaccactatctgtctcttttgcaaagcacagaaacggcatgcatgattgtagtttataaaacacatgtaccaatgtggtctacagcttctgttgagttcgagagggtcagtttctgtaatctcttctggcacagagtcaagaacagcttcactttcctcctgctacctctctacccgtaagtgtgaacccatcactttgctaacactcaggaaggggattacacaaaatagagcaggagccctctgacctgaatatgcatctgagccctagccatagagcttctgattcagtagatctgggatggggcctaaatatttgcatttttaagtgtataagtgatgctgatgctgctggttccaggaccacattttaagaaatatcgataaaggtggagaattaaactgcagctcagaagacctgagttcttgccccagcttgacttttacaatctagcaaatggataaaactcgcaggacttcagttctcttcatctacacagtgagtggttagattggctttgtaatttaaaattaaacagggtttgattctgattcactacacaaggttccaaagaaggaatgatatctcctttcatttcttcactttgtcttctgtccctaggtaatcttatctatgttcctgatttaacctaactaatgtttctgcaaagcttctaatatttacatctccagccctgaaactctcatttgaatgctagtcttatatacatacccccctgcctaattgacatctccacttaaatgtatcagaggcaactcagactcaacaaggaccaaactgaatgttcgaccttgtccttcaaacccgatacacatccaggttcctccatcccagtgaatgacactatccagttaagcaagccaaaagtctggattttttttcctcactcttcctcactgtccgtcaactaccattattaaatctgtcacctggtcctactgatttaaccttctcaatatctctacagtttttctttatgcccattagtatcctagtgcaagctaccatcgtctctcattggaattaacacagtaacccccctacccaccagactgttctgcctacagatagtgtgatatttaataaatataaatctagccttggctagatttctccttcaaaaggttcacattaattttagccttaaaatggtgtgcaaagctttgcatagtctgtcctttgctatgttggcagtattttttactatccctctcatctgctcattctctgtactccaactacactaactttgtttttttttttttttagatttctctaactacagtgctgtaatctctttttcctttgcacgtactattccgtttgtcagggaatctgctcactgtctccacccactccacacactcacgttttcctgcccgtcttaccggtcttgatcggttgtcacttgctcaggaaggtttccctggtcaccccctccacaaattgaattaagtcctcttgctgcatgctgtcctagtgctctttattttcctctcctcatccttaattcagtttgtaattacatgttatttgtgtgaggatttgattattatctgtgtcacccactagatattgggcattctttacttactcaccactgaattcatagaaccacagtaattgtacacaacaaatattcaagagaaatttattgaattgatgaatgaaaagttgtaccttaacatgttcctgacatgtatccaaaaaagagctcccctttggggtctattaggactttggacctaggtaaacgtaaccctagtttcgctcaggtttaaacagtagaaagtaattgggtctcttttgcatgtggctttcctaagggctaaccctgtcttcggaatgagtcaatacagcagagctgttgaaagcagactctagcttcggacaacgttggtccgaatcatggttccgtcatttcttagctgtgtgatttagaataaattaatgttttaaagctttgatttcctcttccttaatctggagatgctaataaagccaacttcgtagaggtattgcgatgagtaaataagcataatttgctgtaaacaccttgcagattgcctgttgtatgctaactaatcaataaattgaagctcttaacatcattatattagatatttccagcattgagtatactatcaggcatgtggtagaagctcaatataaagttttgttaaattgaatagattccatatatggtatttctacagcattatgctccttatttaagtgtctctaagtattttttaagtatcacctcacaaaagacagatgtttaattcattacacatgtgaattgttttagatagaaaataaaataaaaaattcaaacattgaaatcaatagtgtaccttaccttaggattacaccataaaatttctaccaatcgagaataaagtgtacagtctatttcctttctaatacttttaacgcaacaaatgtttattgaacacttactacttctaatctatgacagacataaagatgaataaagcatgccacaatgtttaaaggagctcactatatcataagaaagcggattcacacagacaactctataagataaagtggtaaatttaggctggcctgtgaaacaaaggattataggtatagttaagaggtggaatttattttacttcgaggatttcagttacctttatattctttgtctaacctttcatgtttctctttcttcagaaacagagcacctttttcctgacacattcatttccccctatggagtagagcagttgttttcaaagtgtgggtcccagatcagcatcacggggatggttagaaatgcccattcttgagcctcacaacagacctactgaaacagaaattcttggagagtggagcccgcagatctgtgatcaagccctgtaggcaattctaacgcacactcaagttaaagaaccacgggaagaaaggtccatcctgtaacaagacagatttttttcattagcatcaattttgatcatttatatatatatatatatatatatatatatatatatatatatgcatgctcacaaaaccattcaccttactaggttttagtattccccttcctgtattcatgtggtatgtatgtatacaagatgaacacacatttacctgagacaaggtaagactacacatgtctcatttggggaccagaggctgtaatcttactcaaggtcaaagcgtcttcactgctttctttcactgcttttcaaaagtaaaatttccatgtaggtgtcatttgttttctttttgtgttttagaaaaccgattaaggggtgaagtctggctaaacttagtgtcaggacatttacttagataaaattattttaatttatcttgtaatgttcaatgtgagaagaaaagtccttatgagtagtgtattccttaaataacaacaatttaaaaactaccactgaagtctgtcagagtagttttgcctcatttgtctagataagagaaaaaaggttcacattagggattgcaatttgtctgccaaagtgcagtttatttattcagaaacatttagagaggaatgtgtcagttctgttgcaggcactgtgctgtgacggggagctcaagatgatctcaaaaaatttcacagatggggtgggcagggggcacagagagatgtatttagtggttcagatactatttagactgtggccagcatttctctaaatgcaatccagataacaccttacagaatcatctgggcagcttgataaaagctgtagactcctacccttcatcccaaacctattgaatcagtgtctgtgtgtgaagacctagattgtgactggtaattataccaaagtcttagaagcaactctaggccagtaatactcacatcagaatcagctggagggtttgctataccacagattgctaggttagccttcagagttgctggtccagtaactttggtgcaggtccagattttgcatttccagcaagttaccaggtgatactgatgctgctggccttgatcgtgctttgaaaaccactgctttagctacgctataggaaaaaccatataaggcttttatactggccaatgacttcacaggcctgaattttagaaagcccccttctgcagcttggcctatagattcgaaggaaacagaactaacacaagaaagctagttaggagctagttaaaaatcatcctgacttgccaaggaaaggtgctgaagacctgggtcacagagcaaatgcaaaacactaggactttgtccctagttcaccattaaatcaacttattttctcttaccccctcatattcacgtttactccttactttgtagtggttggacaaaaatcaaataaatctgagaattctaaaatgcacacccttgtttattttctaactcaaatatgccactgttgtctgtgctctgtcaagatttcaacacatctttttctcctgtttgcttttccttttggcatatagtgagtgtgtgtatacacacacacacacacacattttttttgactccttccaatgcccttctgctctccgcagatacacttctgcattctgaataaaaccgaatacatatatatatatatatatatatatatatatatatatatatatatgcacacatattttgaaaaccttatttgaaaagaaagctttcggaggaaacgttatttagccacttaatcgagtcttttactgagggactttttgtcgtcccctaacttcctgtcagcagtccacaggcagcaggaataatgtgggagaagatcaacaggcttatttcaggaggtcaggggccagtgccaccacctgcaggtggagacatcagaagcaggaagcagcccaccagctgcagggagaactccccacagagcctaaccaagatgaagggacttgtaaatttcaaccctcccttttggcttttgtgctaaaaatgtgaatattgaggtctgccctgattaagaactagatacattcctctttgtgactgccacacttccttagcgtattcattttttgtctttcgatctcaagttattattttcaaatgcattgcacgtatctaccatggataccattgcaattggaaggagcaaacgttttgtatgtttacttgacaaagagaagtgactgcccaagccacacagagttctgcacaaatcagtaacttctaacgaacgtttgcacttccgggcttgttctctacctatttcagtcgatgcatttgtattatttacttcaaactccaatactaataatgcctcaatcaggttgcaattgggatttgagcagccagaatttcagaaatttggtttggtccatatctgtgacaggtcagtaaatcagagaagcaagggtttggttgctattataatacattgcttacctatcaatttagttatcagccaaggtggttgttatcatccaaagtggctcattaaccaccttggagactcagtatacaattgcaagtaaccctggaagttgtaaataatcccaactgaatttgtatgagtttggtaaggttaagtggaaaccagctgcttagggccttgattataaatgaagttaggagtggaagaagtaacaaaaccccaggcaaattcattaaacattttttcccttcaactttatgctcacgaatgtgttgagactcttctgaatccataaaacacctttcagcatcatctgggcagcttgataaaggctgtagactgcctgcccttcatcccaaacctactgaatcagtgtctgtgtgtgaagacctagattctgactggtagttataccaaagtcttagaagcaactctaggccagtagtactcacgtcagaatcagctggagggtttgctataccacagattgctaggctagccttcaaagttgctggtccagtaactttggtgcaggtccagaatttgcatttctagcaagttaccaggtgatgctgatgctgctggccttgatcatgctgtgaaaaccactgctttagctaggctataagaaaccatataacatggacaaggcaaatgaaaaggttggaattcttctgaatcccaacacatttgtgagcataaagtcgaagggaaaatgattcttctgaatccagacacatttgtttaaggataaactgttttttccttctgaaaatttaatgtctgattctcgttcattcattcatcaaaagttatcaactatcaactataggtaggaactgtgcaatatgctggtgataaagagatgaaagacacagcccctcccttcaaccagctcctagttgaggtggcaagtcagctgtataatcaagtaattgcaagactgtgcactgaaaagggtgaccacagggtgtgatggccacccagggctgtggaatcagtcccaaaatgaagaatgaaagcagggaagggtaattcagaaagaagaaacagttcgcataaagacccatagataaacatcaatcagatgtggttaagacaaaagtaagtttctggaggctgaggaccttctcagctatatgtttgcagtgcttggtatagggctttatgcatctacatggaagacagaaagggccacatcacagtggacaaggcaaatgagaaggaggcagtatcagaagatgagggtacaccggagatcctagttatatatgggcattgtgttcatctcaggagttactgagtaatgggaccttgactcaaatgaatctcaagtctgtttttgcctaatcttggttttaggactaggattagcatacaaccgcactaggagcctagttatacgaaaggctgcattgcggacctgatacagttcaatatacatactgtcaccttgcaaatagggttacgttagttctcaagactgccaatcctctgtgctctaatccttttggcttttttttttttttttttaactgtctcactctgtcatccaggtgaagtgccctgggatgatctaagctcactgaaacctccgcgtcccaggttcaggtgattctcatgccacagcctcccaagtagctgggattacaggtgctctggcgccaccaggccctgctaagttttgcatttttagtagagacagggtttcaccatgttgcccagactgatctcaaacgcctgacctcaagtgatctgcccgctttcctttggcttttaacactatagagcaagggtccccagccctggggccacagaccagtacaggtcagtgacctgttaggaaccggggccccacatcaggaggtgagctgcagggccgccagcattaccacttgagctccaccttctatcagctcagcagcggtattagattctcataggatcacgaaccctattgtgaactgtccacacgagggatctaggttgtgtgctccttatgagaatctaatgcctgaagatctgaggtgcaacagttttatccccaaaccatcgcctcccacgcacctctccccacaaccccacccgcccctgatccatggaaaaattgtcttcctctaaaccagtctctggtgccgaaaaggttggggattgctgctatagggcgatggttttcacatttgatcctgcatcaaaatttccaggtgactcattaaaatactgattgctgtgccccactcgtaggagttctgataaggtagctgtggggtgagacctgagaatttacttttctaataagttcccaggtcatgctgatattgctttgataaccaaagcaatatcagctttggttatcaatatataaccaaagccacatagagggggagaagttccttgggtttagcccagtgtttactgcgaccaccaaaattgctggagcttaaccatggctcagagagttatgttctgttcactctgtaggctgctattccctgtcaccttttgaactatgatggaggggaagagctgccagctcaggagatttcacttttttctctgcataattgaaaatccagaaacacagggttttgggaaagctatagaacagatcatcagtgatcagtgtttaataaagtaaagcaataaactttactgtgtaaaataggatactttattatataaattttgtccccttcccccacctcacaggccaataaaataatatacttcttgtccctgggtgtaatgttattggaaacctttgaatgtaggagaggcatgggcttgtaagttgcagaaaactgctagcctaggattgagaatttcatggataatccaaaaatagatgattttacagttataagccttacgtgaacttgaggtaagaaaacacaatgcctttatagtcttctcagttgctccacatgccctctgagattctgttctgcccagcctctctggttgtcacatctctgggcattaacagaaagttcacatactctttgtctctgatgataatccttctaggtccatatagaagatccctatccaaaccatcccccaaacaaacctattggttaaatattttctccaccgaaggcactttcttagattctaagtgccctgtaggcaggcttcctctctgatttgggagagtacaaattgcgacaaggttaaatcatagcctgggaatttgacctaaaattcactcttctcccatatgcattcatgaaccttctgctggtttttaaaagaagctacttaatgtcagctcgaagaggttggaaggggttaaaaacatgagcatggcagtaagaagatttatgaaggatctgagaagattatgacttgatcagatggtattttgtcagctagccacatttgtgaagacttgaaaactagggaggcttgtccttctaagagggggcactgctgggacctggattctgtggaaccgtattagtagaataaacaataacctttgcttgtatcaaatgaacttctattctcatgtgtcttttgacatatttttattaatcatatcactgggacctccttgctgaaagatatctccgttccccattctgatgactcccaactaggagtgagatcaaatgaagatggcatggaccatttctccatgtgacagctctctgtggttgccttttaacacttctaatgccctttctcttaagaattcccatttgtcgtctggcactggtgctgtgatcaataaaaatgtaatggagtgaggcttagaaacatgaggaaatttactcaagctatccatttattgatgtgtccatttgtgttgtcagggaagaaaaactttttcactcccctcttaggttcattacttggggggctgcaaattaaactgacgacagatagattggcaatagaaaagacaaagtttattcagagaagtatgtgggagctcacagaaaacatagctcaatgaagttagaatttggggcttatgtactattttaacaagggttttgaaaagaagagtgttagaatttcaagccacaaagttggtgggaaatatgaaagaaactaatgaaaggtaatgtttgttttagtaaagtctgtttatgtaattttcttttcccagcgacaacttctcatctctggtgacaggagtcactctttacccctggtgcaagaaactttccttaaaggaggatttaaaacagttgaattatttcagaaatctttgcttttaggcagatagggggagtacagaaaaagccccttcccgtatctgttgatcctcaaatggctttagctcaaaacaatttttacatcacgatggcataatgtagatctcttcaatgtgttcatttattccacagatatttgtgaagtacatgatatatgccaggtacttgggatacaagaatacataagtatgtccctagtctcgtagaacttacactctagtagtgagctagagaataaatgatattatttattatatgcatacacatatgatttcagatagtgatccatattggaaataaagctggttaagggaatagaaaatgatattgaaggtggacttgtttagattgggtggattggcatggcttctctagggggcagtatttgagcagatatgagagcagatattctccaatttgggcaaaaacattccaggcagaggaaacaagggcaagggcactgagttcaaaagagacttgacctagccaacaaatagcaaggattccagtgtaagagaaggtggggaaggaaggaggtgcaagtataggcaagggcaagatcacacgggatcttgcaggccgtgataaaagaatttaactctttcataattttgacaggacatcattgaagaatttagaaaaatagagtggagatacctgatctgctttcttcaaagagttcattcatcattgctgagtagaggttagactgaaatggaagcaatagtgaatacagggagatagcacaggaagccacgttactagtccacatcagaggtggttcagactagggtggagtggtggggtcagttagagagctggtatttaggatacattttaaagacaaagctgacaggatttgctgtgatgaattagatgtaaagtatgagaataattgagaattatttctaagttctttgctggggaaaagtggaggaggaaaaagttagggtacaaggtgtgatgaaatcaagagtctctcttattatcagagtctcattagatatccaagtggaaatgctggaaagaaagttgggtagatcagtctgaagctgaagacagatactgtgactggaataataacgtaagagttggccggacacagtggctcactcctataatcccagcactttgggaggccaggataggagaattacttgagcccaggagtccaagaccagcctgggtaacacagcgagacctcgcctctacacacacacacgcgcgcaaaaattaatcgggtgtggtggcacatgcctgtagtcccagatactcaggaggccgaggctgaaggatcacttgagcctgggaagtcaaggctgcagtgagccgtgatcacaccgctgcactccagcctgggcaacagagtgagaccctgtctcaaaataaataaataaataatgtggcagtcataggcccttagatggtttttaaagacatgggactggatgaagtcttctaggaggagagtttgggaaaagagcccgagaattgactgcacctttcaaaacaggaggaagaaaaaaaatactcaaaggagacaaaagcaacttctgtgatttatagagaaaaccaggcaagtgggatgaagaaagtccttcatgatagaatcaaaaacagtgtcaaatgttgaaaatacaattagacaaacacaaaagaatagaccattgggttttgcaatatggagctcatacttgaccttgataaaagacattttcactggaagcatgcatcaaaaaactatttgtggtaggttaaaatgtagtaggaggtgaggatatacagacagtggctttcactgtgcagatactgctgctcatgcactaattaaaagacatttgttgagtatctactatgttgtatccattgctaaatagtaacagctgggtttagtcaggtagaacagcatcaaaatcattatagtatcccaagataggtacagtaaaatctgtgaaggaatcagagtagtctcttctccaacagagcgtaagacccagcttcacggagaaggtggtagattagctcatctgggaggctgagtagaagcttgtcattatagagggagaacatcagaagtgtggacaacagcttgaataaccttgaaaggacaaaagaggacggtctgccctggaaatattaagaagtctcacatgattagacacaagatattaggggaaaggcataaggtgaattgagtcaatgaggtcaaagagaagctagctggaggaacaggcgatcataaaatgagtaaaagtatatattcaaagattctttttagaagggctacacaggatggataaggggagagagagagttgaggcacagagacaaattggaaaggtgcaatcataaccagagacatgaaaaacccatagaaatctgatgtagattatgtggtccccaaggttgaacaattaagtacgctttcagttgttatgcccatgatattaacatattttataactgcaataagtgctgaagctaaagataaatacaaacaatgtaattcttattctgtgagaaaatgttgtagctggaagttaaacatgtttcttagctaaagaaaaatattgtgtgatctggattacttaatgttataatttagcaacaaaatgttgacattgagccttgcataatcaaaaaagtagtctattcaataaccacattctcagaaaaaaaacaagaaaatattagaaacaatgataaattatcgtagtaatttaattcagtattctattgttttatttggatttaggaaaggcagaaatgttgaaatattaatatatatccctgtaataatataatttgtgtctgagaggtaggaatgagggcatgaggtcaaagtttgataatgaacttcaaagctataactatgatcaggaaattaaaattggacaataaattcctagaatcgtcaggagttgcttgtgaaatcgagaaaggaaaggatatacacaaaaataaagaacagccaatgctctcaaaggagtctaacttttataatagtcttctgtgttagagctgaactcttctggtttagaaggacactctgttgcctggaaatagggcatggaaaaagtcatcagagtcatgtcatctttcattcttcccatgaacgaaatcgaggccctgaaaagtcacctgtgtttgctgtattttattgcaactaagatgtgcatttttaaattgatacataataattgtacatatttgtgggatacatgtgatattttgatgcatgcataccatgtgtaattatcaaataaggatatttctgtatccgtcacctcaaacatttaccattgctttgtgttgggaacatttcacgtattttattatagctattttgaaatacaaaatagattgtcattaactatagtcaccctactggatgcaccttgtttttaatatttctgaaaacagatacgtctcataggtgatggtgtcacagctgtgcattagttattattgcctgtgcaggtgcaaacgtaactattcatattgttgtcaattaattaaatagttacatttatttatatgcgtttattatactaataaacacaatattgagatagttgagctctagttttgactctgctgttaactagctgcgttactttaatttacttaactaatttggctttcaaattcctgataagtaaaattacaacatgagtttctcctgctataatagcctgagaaatcggtgaaacacatgaattcagatgttgatgctatttaatagcgggattccagatatctacttgccattatgggagggagagaggaggtggactggaggctgtgatttccctaggaggttgttaaaattggccaggtgaggaaagctgagacagaccataaatatgaagcatgatacctagccctcagtgttgaaagaaaatcaaatctcatctttgtggtctaaatatcagtatgatacaatcctctgtgtagacatatcctctgccctattgttttctttctaaaagctaaagcccaggtgtgatcacatccctccgttatttacaaatttctgatgatgatgattcttctaatatctacattccttaccattaccatgatgtccaaaacctattataatctattcgtctccaagtgccatgttgtggtcaccctatgcaccctctaaacccaccatatgaccttcccgctgctacttgaatacagttggccctctacctcgttgtgtctttgcattgcctatttaattgcctttccattctctaaatcactctttcgctggaccagcaacatcagcaccatctgggaattcattagaaatatagatcctcaggcctcatctcagacctgcttgatcagaaacattggagagtggagatgagcagcctgtatttttatcagccctctaggtaatttgatgcacactaaagtttgagaaccactggtctagagcattcttctttaactctcttctaaaaattattagaatgaattcgagggacgggatctccttgaaagccaagaacatttctttgtcatctttctgacttcagggcgtagtacactttttggcccataattaaagctcgataaatgcattctatgccaataaatcagctaatcaaatatattattcatgcccttgaggtatctgaaatttgtttgcagaatgtaatatataactatagagtaacaagagaataatttattgccatagataataaaacaatatcctctgtataataaatcctagcctctgctcaatgggcaaaaacgggactggggtttcagattttaaaaagattattggtaattaaatcacctggagaagcacttgctgcagagatgggacttgaagcatcataataaactgttgtttattatgattcggtcagagctgatggaatcacagggattgtgtgaggtatggaaagtggttgacattgaattccaggctgcacagttgggacttgatatgataaccaaaaagaaagaatgtctggggtggtagcaagctctaaatttagacaatctaggcttatcctaaggagaatatagatacagataactgaagtttgattaaagggaacctggtgtatcacaaatagtaaaaagctgtagttagtctatgcagctatcagctagccacataatacttttgggcaaatacattataaaccaaaagaatgacatggcttatctctgtaacaaagtggctcattgttctttattctactgttatccttaagaaaaaaattttagtaaatttgttatgctatactcaacttcaagaagggatagcgcttataaaaaaattgtttaaagaaacaggcctatttctctttgggagaagccacggagaaacgaaaagaatggaacgtgtgtttctgcccagatggcaataaaatgtagggtaaatttctgtcttttaaaactgtattttttccatccctctgtatatacacatatcctaggactgttataaaatgctgcatgcgtatgtgaaaatggaaccttattgggctgtttgatggacctttaaaatatatttgttggtttggggtacatactagctatgcaatataatccgcattatttcttatgtaaacaatggataaactgtttcacagtccagacatttatttggtcactgtttgtagaatgtctattttatttacttctgaatttgtattccagagatctgccttcaatgttggatacttccactgtaatattctaggagatgctcactttctttttcagcatctgacacagtaccatctgcctcctcttttcttgccacaagtaataacaattttataaaggaggatcacattacagaattataggtggtaaactttctaccaccagatttacccaagaacctgaaacacattttttcaaaaggaaatagaatgtccttcttgtgactacatcggaattttgcttgcagcattatgctttttttttccccctagtgtagctagccatgtggaactgaagccattagccagctcctcatcctataaatgctattacctgggaaaagaggcagaaaatatactctcttctccagttagagtctaaaggaagagaacaatatgggtagttgtgtttaccacaaattgatagaactcctttattttaaatgctaaaaccaaataacttgtttatatgacttcaacattgactatcacacactgttgcatgataacagagtgaaaactacctctattggatttaagtggggaatctatgtctcattctcattctttttttactgtggaaactagttgattccaggatcagccttagctccaacttgccacactttgagttttggtttttcacttgcattgtcacaggaaacttctataggataaatcgaggaagattttactctgcaacgtgttgcagaattaaacatttaaagtggcaaaaccttcgtgtgtaggttgtctccccagagaatgtaaaaatgaattgaaggcagcacctaataggtaaacgacagccaatcaaacaagaacaaatgaaatttgactggcaaaatcaaattgaaaatgtataacgctgaatctcagaatataggaggatgcatagaaactaagctgtactattataaaagtcatagccattgaaaaataatgactggttaatttggttttctttacctcatggatgtgaatggttagattttgatgttggtgttatttgacgtgtgtttgtcaagaagttgccttagtcggctcgcatttaggataaaaaaaatattttaagaaatgtttaagagattatgttggagacattagaaacaaaataattatgcagagggcaggactatcaaaatataatagaaaaattacaccgctcttttatgatttcctcctttttggcatttaacacaaaactttatgattacacacaccacgcactccagaaatgcttaaaggaagatgagaggaaaattcaatagaagtagcaggcatttctgtgaggacagcagaatgatcacttcatctctgtattttttttttttcaaatttctgtatctgtacaatgtcttttccagctctaatattctgtgatttggtaatttccgcactcagattttctttaatgaattttgtatgatattacctatttttataccagatattacctggctctaatttctttttcaccctaggaaataaaagtatcgggtgaatttcccattttcttatgttattgatacaggtctctgttggatatccccacgattaactttcctgcagcatgttcgatggtggcttaaagaagaaaccatgtatcagagccccttgtctatatagacttttagataaagagaaatacatatcacagaattattctgggcgcatagagtctctaaatgcaaaaaaaaaattgtattgtagctgttgattcttctcagatagattgagtgtagagagagagcattccaaaaactgagcagaagaaacacagtctgaatcaaataacatgaaattttagctaacaagtaaataacacttttttcagaatatgcaaataatattggtttattatgaaaaatgtataggctgatagatgagcatagagaaaaaattataaatatcttctttaatatcactttccccagcaaaccacttttaacattttgatacattttcatgttcaaacatttcctaatagtcttttttcctgttatataaatatgaattttaaacattcgtatgtttatgaaaaggcaataagatactgctcttttataacaggctttctgaacttcacaacatgcagtgtattctaacatgctccttgtgttcttaactaataaaaaacctcacgttatttaaaaaaccatcttaaacataattatccattaagagaagaggttggggtagagagtttcagactatcaatatcaaagttatattttctgtaagtattttaatttttaagtgtagctataggtatatgattataaaaccaatagcagagaaaagataccacctttgaatatagttttccttggttccatgaaaatggcctcctttctttttgccagtccctcagtatcattaactcatttttctgtaaatgccatcattgtatcacatgtcctcaggaaaaggcacttttctcttttaagctagtgtttgttcttgttctaattttatggcaatttaacgagtaacaatcctgtttctataaatactgtttcctaattaatctattgcattctatccatgagaatttagatgactttctttgtaagagaaatctctgtagcatgagattcttctttgctcttaaatttcattctttcacatttttaaatgacctgatagtattttgttgtatttgtgctgattttttttaaccaatcttaccttgttgaacatgtaagttgtttctaatatttgcaatgatcaaaatgtggatccaacttcactaaagcgttaagaatctaaaacaaaacaaagaacaaaaagttggctgtcatcttgcttggaccaccccgtgagttactattttcttgtttccggtcacagttcatcctaaatcatttcagtacacaaaatgttttttaaagtttgggacagggggtagagaatgtcaattattcctccaaggcagtcatatgagcattgagtatcatgtggaatagttgttacttgtaaagttatggggcatcaaacccagtcaatatgtttctggaattgaaaaagtccctggacattctaatgatactgttgttcactttgcacctactgttaccactactttgatctgtcaacactgcccgtaatggttaattttgtgcatcaacttgactgggctacaaggtgcccagatatttggtcaaacattattctgggtgattctgtgcaagtgttatcagatgagattaacatttaaattggtagactgagtaaagtagattgcccttcctaatgtgagcagacttcatgtaattaattaaaggcctgaatagaagaaaaacactgaccctcccctgagcaaaagggaatcgttctgcccgactgccttcaaactgggacatgggctttttcctgccttcagactttaaccacaatattagctgttcttgtatctcaagtctgctctacttcgattggaactacactatcagctctctcgggtctccagcttgcttgttcaccctgtataccttgggagttgtcagtctccatagttgcctccataattgcatgagccaatttcttaccacatacaaacacacacagagacacacacacacacacacacacacacacacacacatataattatatatgtgtgtgtatacatattctcttattccttttgtttctctaaggaaccctaatatactccttattactctttctactgccttagagatcttcaaggccaagagcgtaatcctccatcctggctctttttcctaatcattaatgatcaactcatagccatttagctcaactaaaaataatttgttcatgaagctttacactcccacatactgaggaacgtggtacctaagatcaaacagtcactgcctcatcaaatgcattcctcttcaaccccatacaaatgtccccagatggaactcacaccataaaaatattagatcccattgacttttctgctttctcaaggatcattgcagagcttgaaaaagatggctcctccctttgcctaagcaggttaacttggtgtaaaagtacatgtaagatttggcacaaaggaaaataaatcagttttgcctgggtcctaagaaacatttccctctgcctcatggtaattgtacctgccagttgattgcattactcaagtggagaccatgaagtgaagtggtagaacaagaagaaatccctataattttattaagtatggtgaaaaatacagatatgtagagaaatgactgggattagatggagcaaaacataattcgagatcctgatacaaattgtacttcctggctcaagggagggagcagaacattccctgctacatgggaataataataaatgcctgataaaaatgcagatatatcatagactacagaagctgaagtggattcttatggtcccctactcagacagcctctccttcagatgaagaaactgaagcacagaaagctcatcctagtgtttcatattgaaaaacccattcaagtctattttaataacctgttaccaaaaatgagggaaataatttaactttaatgtttcactttgcattacccttttcctgactagacttctatccttttcttgagttgagctcattaactactatgaaattatggttatgggtagaggttaattttatacctgtccatcttctggcatcttatttacactaaaaatcatttttaaatggcttcattttaaaaaatattatttcagttgacattttaaaagacacatcatttatgtactacagaatatgcattttatactctcctttattaattttattattttccaggtagaccaatcaaatgaatcagaaattcttggttagatctattagacagcataagtatgtttttcatcattaaattaagatgaaaacacaattttactttaaagtgtttgacgtttccagcctttataaagtcaacacttaatcacatctgaaatttgcaggaaaaaattttgaaagccttcaattattaacattatttcgggagaaaaagccactttgccgcagaactttcacttttctctcgtgaattaagtctgatacaaattattcattatggtgaagtttaaacataatagagtctagctacttccacaaaaatactattcaatgagtttctacattgacatctaactgaccttgtaattaatgttgtacacgatccttttattatatgctggattatcaaatatgacttattagcagtataaagacacaaagttctgaaatgtaatttatagccatgaaaaggaactgagctttgtgtgacagttaaatttgaagagatcaggtgattattatgaagcatgaataataatgcatattaaactcacgtttttgtttaaatcattaatatgattgttttagaagaaagtctacctctatcatatgggcaataaaatgtgtataagagcaaacatttgtgtatgtgaaataactcaaattaaaaccagttttccacattaattcttacagtttttaaaatttaaatcatttaatgtatcacacatagctttattcattttaagctataaatgttacaatttctgtttaagctgttaatataagctttgtaagagcaattctgtataaatatagaattgtcattattcactaatagctaccatttatttagtgcttgttgagtgcaaaagtactgcactgagatctttgcatatgttctcttaatgttacaattcttacctgaggcatttctgtttctgctggaatatggtctctctgaattgaacaagggaggcatttttggttgttatgatgaaaggtggacactgctggcactaacgtgtgttggtaagcgactagactcttcatgatgcgtaaacagtgtttcctcatacccctgcacattcaaatagaggaaaaccttgtttatagttaatttcccctagaatgtaaatccatttaacatataaacacaaagcgtgttttgtgtggatgttttttactggagcagggagacaggagaggaaatgcagttttgatagttgctgaatttttcaagaatgcagcaattatagaacaatttctagaagtttcctaggagctcttttccatagcagaaaactaggacttaatagccttgcgactcatggtacttgagtgttccatacaactcacctatattcaggggacatttgaaaaattctacattaaaggggattcttaacataggcgcaagtgtctggcatcttcaataggtcttctggtgtggccatgaaaacattcacacgtttcaaagtattttaaaataaaataaaacatatattgttgtgttatgaattattttctttcttttttatatgatggttagatcactgtgcagacaagtttatgagatctattcatttcatttcagggtggtaaatgagggtgttactaaatgttggttctaaaaagggagacattgggtattacagaattcagaacagctctaagccctgtgcacatttagcattagaggacacaggcaaatctggcctccagtcctggcagcttcttcactatgtatatgatgttgggtgggttgctttacctctctagtttttacttttatttctaagctagggctattcatagttctttatcatgtggttactgtgaagtagcaaagcacctgacataattagagcagataaaatgctcaacaaatattgcttatcagaaggattatgtattacctcccgaaatacatcaaaaatatattttccaattcaaagaatatgtagtacaaaaatcatgcctaaattaacagagttgcagtagcccaaggagagaagataatcattattgatttcttcttcctttttgctaagcagttctctgtctctgcctcctcagttgttgtccatcccactcccccactcccaagccctgaactctgaggggtttgctgccgtggccggttctgtagtcattgctgtccaatgatgaaaacacaaaatactgcaacagaacactatgcctgtcagcttagctcccttctttctgctaaatgacactcaatcctattcttttgttctaaaggatatcctaaatgaatagccactggggggaaaaaaggttatataagattgtgcactgtgtgaaactgatgcaaccagatcaatgatgtgaatttctcttaactatttactgggatctagaaacaggtctctcaacttagcagtgtttacgaatataataggccttccttatacatacatctgaagccaatctgagtcaggaagagtcgtggtctgataaatattttgaaaacttgcatttgttctattaaagcaaactgtttattaatagtgtgccttattttttaaagcaaaacatttataaacagtagtcattacaggcacttcagtgtacggagtgatcaattgttagacctttaggaatcgattgtttcgtggagcttcggcttataattgaaatgtcatcagaaggagtgtaagacatagcttcaggagaggccatttatgcgcttttgttttcagctaagttatagagtcatcatgtgaagaaagattcttctcttagtaaaaatcctttaatggttggaataacacttgatatttaatatttctttctactttatatccacatttattcaagtgctaacgcgtgtggggcagcaatgaagcactttattccaacattatagttctcatatctgcgtatgattatttttcatttatcgttagcatatatataatgatgacttttaaagtacactgtattatattcactggaataatgattagctattaataatttgaacactatccaggaaattactgaacatgtcctacaagataaacctcgtatgatattgtctccaaataacagtgctaaccaagaagagtgctaccaagttcaaaagtaatcacagggagtaacctaaatgcagctccgttgggttaaaaatagtttctctaaattatatgttccctaagtttgagatcgatttctacaaggggataaaatgtttttataaattctcagtgataagtcatgtgattaagaacccccaactttttttccaaagacatttgcatctctgatcaaaataacaagatccagtcttagttataaattggggaattttcatcaaaataaggagctactcgttgcataagaagactagtacaacttaaagccaatttaatttcaatgaatgcatgatcagctccattgccaattgagtgtttttcttattcatcagaagatgggttcatcatcgtgtttcatatcaactgttctcaaaccatattgcccatttaaataaatatagatttgtctcgaaattctaaattcatgtcatatttcataaatagcctatggtcctatttattactttaaaatattatagatataatatttttattctaaagtaactgtgttatacaaccaaattattcatttaaatatgtgactttttaaataagtaaatgacttatttaagtaaagtcattaaaattttccagtctgtccttcatccacctgatctttgaatgagttaggaacaatacaggaaactaatacaaacttaattttgattacaaaagatgaaatcattctgttatttattcaacacactatgtgtcaataaaatcttatactgtgaaagaattcgtctaagtccatttgctgttgcttgtaacagaatacctgaaaatgggtaatttacaaagaaaaggagtttacttcttacagttacggaggctgagaagtccaaggttgaggggccacatctggtcagagccttctcccatccaagtactaaccaggtcgaacctcacttagcttccaagatcagataagagtgggcgcgtttaggctggtgtggctgtagacttgttagagcctttttgctcatggggacacagcagagccctgaggcagtgcaggacattacatggcaagaaggctgagtattctaatgtgttcatgtctctcttcctgttcttataaaatcatgaatcctactcccatgataacccattaacctattaatttatgaatggatgaatccattcataagggcagagccctcatgatgcaatcacctcttaaaggcacaatctcccggtgctgccacgttggggattaagtttccaacacatgaaatttgggggacacatttaaactatagcaaaattgtaataaaatgttatatagaagcaatgttcttactgattataattgttatattggtaaagtgttaagtcctctaaccaagggatatatttcagcttattataatagttttaaatttacaattcaatatgaataacatctggtaaaagttcttttcaagaaatgggaaaattagaaatgtttagaagaaaataattcaataaatattaagttcaaactggattcatagtttatgtgaaattctgggaaccaattgcaaggggagaaaatagttacaatagcaatggtgaggatgagaataagagcaggtatcaacgttaattgagggtgtgttatagttctaatcgtgctatgcccactacatgacttttccctgtgtgaggtttccgagcttcttcgtagtaatcctaaattgagctggagagaggctagggtaacttactcacgctcatagagccatagagtagtaaaacctgtatttgaactctggcctgtctgacatcattctgtggtcttttaaaccaccactgcttctccatattaaaactccaaatctaggtgaaaagaagaaaactcagaacatgttctgcaacaaaatataacaaaatataatgtatataaacacttatacataatatcactaatatctttactatgaaaagactctgatacgaacattttacataattcatgcagaagtgttaatcacattgtctgtgatgagctgtgtatgtatctgataaaattctggcaaccagacatcaactcgtaggcatagatctgtaacactaaatatttgcctcgagaaacttaaagaaataaagacaaatgaatgaataggaacatggaactgagtacaagataaaatcctcctaaagcaatcgatgtacttgctgctgcgttattgttctaagcaaaagaagcatggcgaagggagatgtgaagctaaaaacagaatgcttagaaggagatgatagcaggagggaagcaaagatgggaccaagctcccaaaaggcgggctttgaacaaacaaaacagaaagctaagcctttgacggatgcacgggatgcaagaaactttagtcaggaaagaggaggcgaagaaaaaccctccaaagaaaaggtgaacaatattttaataggcaaattgacagatagcaagagatatataccatgctatgttttctcattgcagctgaagacaaactggggttatttatgctttgaaaaagcgtaaatctaaaaaacaattgtggaggaagaagcgatgaaaacacgtgttaatacagaaaacatggctccaaggctttaaacttccttgtgagataaatgcatttacattttccgtagtagctaatatatatatatatacatatatatatatatatctgggaaaataatacacagtgattttctttctttttttcatctacttatgtgagaaaaaagtaggctatctgaaagcttttcagttaaatgaggaagaaagttaggtgatcttgtaaataatatatatgttcaagataatgtaaggcccttgtgtagttttcaaaacttatctttaatagcagtttcttctggggatggggtagttcaaagttgaaatgttagaaagatgttaactttttttcctttttacttctccctttcaggatggaattaacaaatttgattacaaatagatctcagagagaggcaaatgcattgaatccagaagtaacataaaattagatcatgtttagttatgcccgaggtcacatggtgataaaaatgaggataaactgaaattgtctgtgagccagattagtttattttatgccagtcctaggaaaaagacacatcatggtaggatacatcctttttttttttaattatactttaagttttagggtacatgtgcacagtgtgcaagttagttacatatgtatacctgtgccatgttggagtgctgcacccattaactcttcatttaacattaggtatatctcctaatgctgtccctcccccctccccccaccccacaacagttcccagggtgtgatgttccccttcctgtgtccatgtgttctcattgttccattcccacctaagagtgagaacatgcgctgtttggttttttgtccttgcgatagtttactgagaatgatgtattccagtttcatccatgtccctacaaaggacatgaactcatcattttttctggctgcatagtattccatggtgtatatgtgccacattttcttaatccagtctatcattgttggacatttgggttggttccaagtctttgctattgtgaatagagccgcaataaacatatgtgtgcacgtgtctttatagcagcatgatttatagtcctttgggtatatacccagtaatgggatggctgggtcaaatggtatttctagttctaggcccctgaggaatcgccacactgccttccacaatgaacagacacttctcaaaagaagacatttatgcagccaaaaaacacatgaaaaaatgctcaccatcactggccatcagagacatgcaaatcaaaaccacaatgagataccatctcacaccagttagaatggcaatcattaaaaagtcaggaaacaacaggtgctggagaggatggggagaaataggaacacttttacactgttggtgggattgtaaactagtacattcttaacatcaatttattcctaaaagcaatgttcatagggcacactgtaggccatagatttgcctcacaaatttaaaggcctaagccctcaacatgcacagcagtatactcagagactatttgtaaagatgacgattctggaactttttaatgaccccaatcattagcaatgattaaaattaatattcaacattctatatttaccaaggcaataaagtagactaatctattttaaaagggttttaaaatgaagagatgaaacaaaccaaatgattttgatttaaacttcatgaaaacataagttgcattaatcaggtgattttgttttatgagcattctgattgaagtgatcatatttagccccgggagaataagagaaggtaaagtatgggtatggcactgaatttactgagatgattatattgtttgagttaaagaacttgtattaagaaacaagtatgtgccaaacattgtgctaggagcaagcaatgctaaaattacatgggtagaaagagagaatgaaatatctagaatgagttagaaacatcagtgttttccaatgtggagccctgacttcacatgaaaattctcattttcaaacaaggtagtttatgaaaactggactattagcaagacagggtgggcatgccatcagtatagtacctggtgtaaaactagaaattttaatcatttgtgctttcattttataatcagtaaaatccaaggtaggacaaacttttactttttctgtataatggactgatatttgaattatacccaactttaattttttgccagaaattatgctttattgtttctctaaaatggtactatagatctttatttatttctatatatttatatgatttttacatatatgtgcatttacatgtatatacatccataaactatatacatatatacacataaattacaaatatgtgtacctacgtacatatatatgcatatatcacgcaaatacaggcacattttcaatacccctttttgatttttttccttgaagagcatagcatctgaatttattatggatttatttttaatttatggtcatgttctttgagtgcttttggtgtttatctggttgccccaaactcgctagcattgtaaagaagatgtgcaaagcctgaatctagactgactttcatattgactttattagtcaaaaaaagtagatgaaaatgtaacagtccgtgttaaaaatgggaataagacagatgttcaagccctagcttcagcagtttttagctgagatttactggaagaaaacattttctgaactgtaaaacatgcaaaatgcctacgtgacagacttcattaacattattaaatgctatgatatagtaaaagaatttgtaaactgtcaagtgctttgtcaacattaggaatttagttattataggtatttccatatacatgttgtatttagaattccctttaattttatacttagggttgatttgtattttaactaagtcactttatatatctggtcccattatacaagtatacttttccttaggataagaaagtgatctttatatatgtttatcaacccaaatgcccatcagtgatggactggataaagaaaaggtggcacatacacaccatggaatactatgaatccataaaaaagaacgagttcatgtcctttgaagggacatggataaagctggaagccatcatcctcagcaaactaacacaggaatggaaaaacagacaccgcattttctcactcataattgggagttgagcaatgagaacacatggacaccgggaggggaacatcacacaccgaggcctgtcgcgaggtggggggcaaggggagggagagcattaggacaaatacctaatgcatgcggggcttaaaacctaaatgacgggttcataggtgcagcaaaccactatggcacatgtgtacctatgtaacaaatctgcacgttctgcacatgtttcccagaacttaaaatttaaaaaactttaaaaaaagaactgtagatactgatccaaaaaaaatgttcattaatgggggttaaatgattatttctaagtagactactcttgaacccttgaatctttaagaattttctttgctattgaagccattcaaactctattttattaaagctgtcgttattctagtagattttaaacagtaatacctgaatacattagaaatatgcaaatctgcattacatatggcatctgcagagcagaggagtttggtcatctggactcatgctaaagtctccgaaaaatccgcttgtcttaatgatggttgactcgctaatgctatgcgtatatagtcttattttaagtgattgaatgatgtggctaataacccctctgttagatgcactcagaacctcacctacctgggtcctcagctctccagtgaaatctctactttaagtttattttctaacatggtaagagccttcagtttatgttatgctcaggcccgtcactgtgaataaaatattagaaatggactttttttttttgtatttttttaatggatcccttggaactttaaaaaaattatttatttgagctttctactgttatcacagtgtctcctaagcatggcctcccgttttttgttggtaatataattcttacgttattcaaattagtaaccattatttttctcatggctagaattctggaaactattaggaaatcactgagcataattgaatggctgtttatttgaagagctatgtcaaggcagcatagagttgtattttcttgcaggggctctggagtcaaagagcctgggttcaaaccttggctccaccactttctatctgtggggcattgggcgtgttacatttgtgaaacttttgtttctccatttgtaaagtgaggtttgggggatgattaaaccagataactcatgtgaaatatttaatggaaatgtatttggtaggggatttattatttttaaatttggattgcacatgacacatgtcagggatcatgctatgcattttggatagaaagatggctaagatatcatgcctgactcttaaaaacttacctaatggtaaatgacgagttaatgggtgcagcacaccaacatggcacatgtatacgtgtgtaactaacctgcatgttgtgcacatgaaccctaaaacttaaagtataataaaaaaaaaaacttataatcaactgtagtagaaagagatctgaatggcttgccatttagctaggcacatggtatatgtgcttaattcatactagcagccactacagttgtcatgattaataatgagcttccaactgcacagaatgcttttaatccatagaaaatcaaatcagaaacaagtttttgtaaaattaatgtgaaaggagcaacaattaaaatgcaagattgacatttattttctaaattggttctattttctttcacatttacaaaatttataagaaaattctttatttctatgtgatataaagaactagaatgtactttgatgtgaattattgttgccagtgctgttcaacttttatccataatttactaagcacctacatttagacaaaggcattatccatccctttggggaggatttcagatgattcatacacagacctggtctcgaggaatttaagattttctttggggagggaaataaggactttaaccaactcaagagtacttagagaattttctgaaaataattttatcaatgaaaacttgttatattaaaagaaactgtcattctgacttccacaaatctaggcttgaaactatggataacgagatattttctattactctcactcacgtcattttcacaaagtgaaaaggtacattttaactagtgaaagaatagaggaaatggaagtagctcgaggcagtggacgatgattcaaaaagacagggccctattatttgatcaagttatgcaacgactctgggcctgtttcttcacctctggaaggaggaataatctccaagccctttcagactcttttggtaattcacctccagcacatcttctaaatgccagcattaactgtcctctgatttgtctcatgtttttctagccccatgctctcctgttcgccatttaccctcatgcaaggtacaaattacacccatcatcacaagacacttgctcaagtcccattgcccccttgaagacctgccacacctactctctcaaaaaccatcatttcctgaaagtcctatacagctcatttggtatttacagtgtactgccacaagccactaagcatcgttttgtgaatacatgacttacagacttagcttgagtaaagatacttgaaaatgaacaccatttcttggctatcttcctattttgatgtacccttcaggcctatgaattttagtataatagataaccaataattatttcttggttctttcctgcacatctgaataaccctatgcaaagtgatagaatgtttttctataaggaggtcctacactggagattgtgtatttcttaatgctgttgaaggaagagatgtgtatctaaaataaatagactctaacaaacattaatttatatttctattatctgttttgtgtattgagatatctcacaaaaataactaaacattttggcattattgatattacatatttgccatgaatatttgtaaatgaagaaaaatatatatacatcagtaattatcttggcaaactcttcaattatgcaatattgttacatagattacatatctaagtgaacactggagttttaacaatattgtgtgttcataaatgttttatttattattgccactaattcttattgccatttcaagaactatgtataagttgttctaaaaactattaaagtataggtgaccatggtcactactgcctactttggtaaaggccaaatatgtgaagactttttaatgtgttaacaaacgttgaaggttttttaacctgttaacaatcagtaggactcttgaaattatttcctaagagagtaaattttacaacttgcaaagcatgattaacctcttgtaattataaaccatctcttgtagttatgtagcattttgttaatgagcaaagaaccattgtggttcctttttacatttcttaaaataattctccgtaacctcattgatatctccagtaaatttagataagcttttttttttaaaggagggttaaaatgacattttaaactaatttttcttgttagttatacagagttgaactatctgagggttttattgacagtcataaaaaatttgttattttctgtgaaatatagagaatttaattcattatcatattattaattctgtgggccattgtcttaattctagaggcacaagctgttttcatcccactgaaatagaggaatcaaagtatgttccttgctcaaagcacaaaagtgacatactacatagtatgcttcttgagtagtcgtaaatctcatgtgttaaattacatcccaaagatttcagtatgttttatgactttaataatttatggtaatttctaatctggcctttgttgacctgtcttgctttttaaatttttagtttttcgacaaaataattaacatattttaataatcttccaaaggtgtttaaaatggcattgtatagagatagctgaaggcttttgagcttctgtgttgtaaacactttcttaataaaacatgaattgctaccagatgatccagcaatcccactactgggcatttatccaaagaaaaggaaatcagtatctttgaagagatagctttgttcccatgtttactgcagcacttttcatactagccatgatatggaatcaacctaaacgtccatcagtggatgaattgaaaagaaaatgtggtatgaaacagaaattgctgctttaatttatattaaacacactcatattcttctcagctgttaagtattgagttatagatttaaagaattctattgtgaagactaaagtgactattaaagtaagaaattattttttccattatatttaacttatttcatactttaatgttagcgccaatgagcaagactattgaatacaaaaactaattaagtagtggtgatagtacagtatataagggagaacattcttttagaaaggaacaataacagggagcaatagaaacaatgaatgagtgtaaggtcacttagtgttaaaacagctaaaatatagtacaaataagttgcgttttaatagtgattttatataattacaccttgatgttttatttgttacaagaattgtccaggaagatttctctaaagaccaaaggcactcttcccctaaataactccaaagccagtcctgtgtttctataaaaaaaaaaaaaaaaaaaaaaaaaaaaaaaaagtgaaaataacgtgatgaacatttttgaggaagtataaaaccaaaatactccactgcatagctgtttctgcaggtattgtattgatatattacattattcagctttggagtctccacatccaatgttacatcatcactctaaattaaacatgtatagataaatgaaataaatgagatagcatatgaaaatctcatagcccagcccctgcactatttaaaatagaaataccaaagaattgtattcctcatctgaaagctatttagtggtggtgtttcaaataaaaattccatctactgctgttgcttccattgtatctttttctctgcggtactgaaagagaaagagacccagaaggggccttgtctgaagtgtccctcttttaagctgttgctgctttaagcacagggtggacaaatgtaataggagtttcataaaggtggaataaaccagcggattacggtgtgggtgaatactttcagatgttaaccaggagctctgcttgcatgctgggagttgcccatgcctcttctagattgaggcacattatcatgcacaacctaactccaagaaatcttttaaaccactggaaattgaacccagaacatgtctctaagccagccttttcatcctgacaccgaatcatagcatgagccagtctgtcagggatgctgctgctctctaggcaaattttaaatgttgaaataatgaatcatgttttcttgaaaaccatgtacaccaaagaaaagttagtcattttatagatgatgaatattaacattttcttagacaatctgataaattatcagatctcacttttggctctttttaagacagttatgcctcagaaatattaataaacccccaagcccttatactgatcagtatgttcactactagctatgagaaattcttgaagttcttgtaattattgtattatttccttactttcattttattagtatgtgaataatatttttaaaaattctagtgtatgtcttgtatatattttaacaacatgacttttaattaatgtcttgataacatttcttctagtgtatgttttcagtaacatgattattaactgtaactttaaaaacctgtggattagatgggaccattttaaaatgttttaaacctggaaaatctgatggctttaggtttagttcaagctatagatcacctgtggagaatggaactgccaaaaaaaaaaatagctgtagcagccctttgagtattctaaaatagggatgttatccagagcattggtttctaaagcttccattatttattgatgttgagctttcaggatttagctacaatatttactcaacatctaagccatgcttttttatcagtcatgttttatatcttttataatcaaactgcttatcactgaaaaaaatatataagtttctatgtatctggaagaattctctggtgtttcttagatatggattttgatgtgtggaataagaattcaattcaaggataacagagatgttgtcctgaaaaaaatcgaagaaaatcagcttttctttaacattctgtcaaagctcctgactattagtttatcagcactgttttgccaaaggtgtcttctcttctcttctttgaaaaaaatcatctgctgctgctacgccgcaagtgtgttcccgctgtgcctgagaagatgtgtggcataaaaaaatgggcatggcctgagttaaaagtgctacatttaagccagagctggcttatttattagttgtctaatcataggaaaatgacagagcatgcttttctcttgcaatatccgttgctgaaaattaaacacatgagcagagctttcagagaggttgactggcctctcagacagcacctcataggatggcctgtgttgaagcatctcctttaaccagggtctgtccctcagcattgggttggctcacctagattggattgtcccagcagaaaaaaaaaacccaaaattcagaatcatatccaaaccggaatactctttcattcacattacttgtactaccttttcagaaactggatacctgagtgtgtgagggtaacttagaaacttatctcatggttagaagttttagaattagagagcgatgatcatgaaacggacttcatgatcagaagcaatggagcaaggaatgagatgtctttgaggagtatttccctgaggctgtggataacgctgacgaataatccccaccttaaaagtgggttgaccactctagtagctgtaaggtgggagggttctttcttcagagataaatctgtgctcttcacttgcccatttcccaggttttcatgtaggtagaagaaacacctgtaatctgaagacactcttccttcagctttgttagtgacagggatttaaatatgtctttcacacattttccttagatagttaaatttcacttttcctgtttgtttttctctgaaggtattctaactcccctcctaatggacttctagagctttctaattctatgcaatttctgttgatttgttctggtaaactttgaaggtaatctctgattcaacttcttggagattctatcatgtcatctctgtttattaactttatgttactcatggtttcttgatgaggactcattaaacataatgtaagtagaaaattattaactacataatatttactacgggttgttatttctgatagtagctagctgtaagattccaattgttcttcaaatctttgtctcagtgatctctgtgtagttcttgactacttcaaataacttcctagaaggatagggatttaataatctcttaataggaacacttaacacactgctggtgggaacgtaaattagttcggtcgttgaaagcagtgtggtgatttctcaaataacttacaaaagaattaccatttgacccagcaatcccattattgggcatatacccagaggaatagaaatcattctaccataaagacatatgcacgttgtgtatgttcattgcaacactactcacaatagcaaagacatggattcaacttaaatgcctatcaatgaacagactgaataaagaaaatgtggtacatatacaccatggaatactatgtggccatgaaaaagaatgagatcatgtcctttgcagcgacatggatggagccagtggccattatccttagcaaacttatatggaaacagaaaaccaaatactgcgtgttctcacttataaatggaagctaaatgatgagaacatatggacacaaagaggggaataacacacactggggcctactggagggtggaacacaagtggagggagaagatcaggaaaaataattattgggtactatgtttagtacctgcgtgagaaaataatctttacaccaaacccccgcaaaatgcagttcacctgtatagcaaacctgcacgtgtacccctgaacctaatttaaaagttataaaataaacgtatcttattttcagtacaatacaccacagagtagaagggttaaaagagattgcttctgaggaggtgagatgggggtaaggacagcacaagagcattttggggggtgatgaagctgttctgtgtcttgcctgcgatgatggctacacgactaagcccttgtcagaactcacagaactttacttcaaaaggagcggattttactacacatcaattccaataacaaatactttgtctttaagcaaagggatacctaaatatagcgtattgaatggatctccagaaaaacacatttttcagttcatgtttcagcctaggcctcatctcatccaggaaaccttgtcttgcttgcctttacatacatgtggcaatcagtagtttcttttagggctcggactgaacactcaatgaacttcaatcttagcgcttgtcgtagcagattgacatggtttatttatatgtgtcattctctgtagtaaaaggaaaggatcaaggccattcacttttgtagtgattgtgcatggcagtatttggcacatagtagattattaattatggaacttctgttttcacacacacacacacacacacacacacacacacttcagagctattttcatttaaatatttgctttagtctccaaagcccctctgcctcaacaccaacccttctatctcattattcatcagcttttctcctattacgaaactacttaggaaagcccacttatttagcttatgatggcaaaaataaatatttgtacttttttttttttttttagtcatcgcttcatagaacagcctctgtcctctgcttatgccatgtctgaatatatgctggaggtaaaaagagttcctggttgagagcttcaatttgagaaactatctgagattactttccaggttccaccgtggaacctgtctgaccttgaacaaatgacctcgaacaagtggctgaaatctcttctatttcgtcaactgtaaaatgggggaaaaccatgtctatctcatggggttcatgtgaaggttaagaaattgcttattcagtgtttagcacagtgcctgatatgcataaagctcctaggaatattagctgttattgtatttccttaaagaagcccatagctctatatgccctttcattatatgttttagtagcccaatttaacatatggataaaatatttttaagttaaatgatttgctaatggattgttgaacgagtggcagacacccatattatagacgaaggtcaagtccataacatacagtacatttccccactttcatttcccattaccaaaattcattattctcctgagaaactcattatagaattcatgtcagattcatctgtgtgttcccagcagtgccttatatccagaaataacactgagtcattgtctagatgtagcagaggtggaatcctccaaagagaagcctcagagtggccaggtttgccaagtatagggatgccttgattactggccttactctttatgctcgtgaattcctaagttttattcctcctgtagtcatagattggcttttaagctacaagctgaagagagagaaaacctcttccacctcgttggaatatgtctcttcaatccatttgagccaatttaggacatgagactgctcttagtctagaaccagtcatcaggagaattccaggtctgattgactcggactagcgggtcaatatcagggcaaaaattccaacgcacaacacgatgtatcagtaaggagaacctcaaaattatttcttaacgtccagatcatgttcctatttttatatatctattttctcacataagtcattaaaatgatgtacctgtgcgggtcctttaatgatactcaaagatcttgaattataggctaataactaacttaataagctgcagaaattaacatttctgctacgtttatgtagcattttcccacatgtacttcagaggcttgagaaaagaccctgaaataatgactgaataacagctttactcacttaatttcaaatttgttaattcttctgggaaataccgtcaacatccattttattatttttctcaattacatgtacgtttctacatcagtggataagttaaggagaagaattccctcatgataattttttcatgctcgaaaattttgaatcaattttttattttacattatactctttcctagtcattagaaagggagtggtggttaagataggcaagaatgctttataaggatactactctcgtttcaattcttaacatcaaaaaccttaacagtgtgtagactataaaataaaatatctagggatcagagcattgtgctgaactttgcaggttttttagtcaataatatatatgacgtgttcacagaattctttgtcaacaaagtacttttggagctccaggccatttaagttggtttttgtactttttctttttcttcggaagactttttttgttctatttacctggaagtgtttcttttttggtactgtgaattaaaatgagaccaatctactaggcaggaaaaaaccttaattagattgttgacacagacaaataagaatgtcaattagcatctactgtcacatgcctctccagactgcttctaggatgagtggcctcaagcagctacatcatctttatactcctaaagcatcaaggaaacttggagtgacaattcatatcatgaacacatccacagtgatgatgattgtgcttcttcccccccacccaacaacaaaggatgaatgccaattaatgtattcagttttttgcgtcaaaggctggatcacttgtgcaatgagggtaatcatcctgaccagacaggccatacaatccatattgtgtgaattaaagataatatgcgtgaaacaccttactctggatgtggttcatagcagtagcaaaaagatgaaaactatggtatgctaacattttagagatctgtactctattttaaataattttataaaagtgcatatacaataaaaagtgcacgtatcacaagtatatgcctcaaaatctaaagccagtcatgtaatcagcatccacttcaagaaagaaaacaaaacagtacccctggttcctctttgcaatcattagtctcccaagagtaatcaccgatctgatctgtgacagcatagattggttttgccctactatatttttgctgaattatacaatatatgctctttaatgtctggcttcttagtgcattgtatttgtgtatcagctattctcttgtgtgtagttattaaacaatcattttatgggctgcataatattccatagggtaaatataacagttttattgataacttagctattacaaatagtgctgttgcagacatatattctattacatgtcttttggtataagaatttacacatttcacatgggtgtatacccagaactgagattgctaaatattggggcacattgtatacattttgatttagtagataagatattgccagatatcgtaaatgcacagtttgataaatatagagatttatactttttctagagaaaagccatcaatatcagtgtatgtgtatatatatacgcgtgtgtatatatacgtatatatatacgcgtgtgtatatatacgtatatatacacacatatatatacgtatatatgtgtatatatatacgtatatatatacacatatatacatatatgtgtgtgtgtatatatatatatgaaacaactcagaagcagaaagataccccatgttctcacttataagtgaaagacaaataatgtataaacatgtacacatggacatagagtgtgtagtgataagcattggagactgaagtgtgggggtgtgcaagggaatcagtgataaattaatggctacaatgtacataatttgggtgatggatacactaaaaatccaaagttcaccactatccaacatactcacataataaaattgcacttgtaccccttacattcatacaaataaaaaattatttaaataaaaataaatatgtgtatatgtatgcatacatacatatgcatatacatatgtgtttgtgtgtgtgtatataacttacacttaaaataagcatggatgctgcaatgaatgctcaatttacaagggttgtccatccaaacttgtggcaagtatctcacctctcaagttgttttcttttttcttcatatatttcttgcttttgtctaggaaggaataatttggcttgcctttcaagagtgtacagtcagcatgataacccaaacacttaagacacgtgctaacccatgtggatcccttgagagaaggaaaacagtggtccttttactgggcagatagagcccggggccaggtttcgtggcttgaagatttcagcttctctgcgcctctcagctcagtgcctctggaagcaatttacaacttgtgaggccatactcaaaggccctgttattaattccccgccttccgagaccccatttcagaggatctcaattgctctcagagtgaatttactgtttcctgaattccgtaatcccaatagcaggtctgttgtcctcattagatagcttaagttagagtcggcagtgtaattggcaactgagctactaagtatccaatgcttatgtggaaaatatgttccctattgcaaacaactgatattcatattcaatttggcaccatcatctatctataaagcagatactacttgtgtttattaagttttatcccaaataattattttagtaataatgcttgaaaataggccttggtcatttgcatgtctgtatatggcatatcctgagtctttgtatgtattagaaagatcactcgttttgacttgatggtttaataaaagatgtccctcactttgggcagagacatttgaaaaaggcactccaaccagggacctaagaggtgaatgagatgcagctctgaatcaggtcacacggcctcaggaaggaaacatcttggttttcacatccctcacttctcgatgtcatgtgcaatacacaaatgacccctcaacacacacacaggcacatacacaaacacacactcactcactcactgtattgtctctttccttgactaagtccttcttactaactcaagctctaaagcttttttacttacctaaggtgagtgtgtgaggatttgaggtttcaatattaaaattcagaaacatttaaagttcattttaaatattagtaaaaaaaaatcttgacaaaatacaattatagacaaaaagaaaattcagaatatttggaatttaaggttgaggttacagccctatttatgaaatattagaagaaaaatgctggagagaataaagcaggtttatgagtctgatagaaagcataaccagatgattatgcatatatttgcatatgcaaagctttctaggcaatctgaacatttaaacctacaaatgtggctgcgatgaacagccacagaagagcaggctagaacagaagaggaggctagaacagaagagcaggcagaagttgtaaatgaaatgttaattttcaatggttgatctcccaagtactggaacagatttgtgctgttttcaaggttttggttcaaagaatccagtagtgtattgaattgttttgtggcacttccctgttattttgctttgtaagctacctcaatccatgaagtggctatgagccccttatacaacactgttgatttttttttccttatctacgcaaaagatttttgattcagggccaggcatggtggctcacgcctgtaatcccagcactttgggaggccgaggcaggcggatcatgaggtcaggagatagagaccatcctggctaacacggtgaaaacccacctctactacaaatacaaaaaatcagccgggcgtagtggcatgtgccggtagtcccagctactcgggaggctgaggcaggagaatcacttgaacccggtagccgagatcctgccactccactccagcctgggcgacagagccagactccatctcaaaaaaagaaaaaaaaaaaagattttttattcaggtggctatcagactcattaaatagaagccttaggttaagttcacgggttgctagttggaagcctccatggactatgttcataaaataatagaaaggagttatgcaggacttcttgaaatgttatttaaaaagtcagaataggctttctattacttgtctgaggtcaaatacatgtagtgctttctgaccatttcatccagggtgttagctaggacaataagaggtgcttaaaaattattagattgagtaaatgagaaagcccttagaaacataggaacagaatgacccttgctttggatctaatattgactcccacgcctaaatccctttggagaactcctttattttctcttccatcaagagcaggtataaattaaaaacaccattaaaggggccatctagctcagctgaagctttcatcacacatgtaggggaggtatggttgggagggatctttttatcctttaggtcttcaatttacataggacttttgaataatcaaatagccccaaagagctgatcttaggactagttgtaattgagactatttctccatggggtagaaaaatctagttgtaggaaaactgagaagtagatgtatgttaacctcaaaggctgttttttacaaaggatgttaaagcatcatctttgctcagaaagggagcaataaaacaaatgagtggaaataacaaaaggaaataatggccaggtgcagtgcctcacactagtaatcccaacactggggggctgtggtgtaaggatcgcttgaggctagcagttcaagaccagcctgagtaaaataggcctcatctctacaaaatagatagatagatagatagatagatagatagatagatagatagatagccgggcgaggtagtgtgcccctgtagccccagctactcaggaggctgagatgggagaatcgtttgagcccatgaggtcaagtctatggtgagctgtgctccctcctgccactgcactccagcctgggtgacagagtgagatcctgtctcgaaaacaaaaggcatactttttagatgtaatggaatagagtacttccaaacctggctgcctgctggagttgtattggaagaggttgcacgacttcagtggagatggcctagatgcctgctcagcagtcatctagttaaagcaactaagaacatgtaatatgaaactgcaaaaagagatcgtgtacgtaaaatcactctgggctcctcagatagagtaataaacacaactcctgacagccaaataaaaagagaaataatacagcccttgacttccttggttgctttgacatactaagtaggtgttacaggttgggttctctgggaaacagactctaaaacatttttatttttactttatttgttgttattattattattattattattttagacagaattttgctctcgttgtccatgttggagtgtaatggcacaatctcgtctcactgtaatttccgccttatgggttcaagtgattcttctgcctcaaactcccaagtatctgggattacaggcaagtactaccacgcctggctaattttgtatttttagtagagacggggtttcatcatgttggtcaggctggtctcaaacacccgacctcaggtgatccacccacttctgcctcccaaagtgctgggattacaggcgtgagccactacgcccggccagactctaaaataaagtttaatatgcagaatacttatcagggaatgcccactggaccaatacatattcaagagagggcttagaagcaggattggacagaaagagaagttgagctgtaatgcaggcccaataacagccttagtgttaagcaggctgagagattcagcagttaatgagacagtcaacccaaacagttttataggcatcaaaagtatgatcagcatggtgtcagtttcctgtgtcacttgtcccacagtatgataccaaaattaaagagaccagatgacatgcaacacaagcagtgtgcactctgttgttgagaagccaatttcgtcatgcaattaagcagttttatactctgcagctgtactttaaggggagctgagatggaacatcatatgtctcaccataaccagaaaggcagatgagaaatgttctatcgccacctcccacaaggtaagggacttccctaaagatacagaggtgggtggaatattgccttggtagacttcctctcaagactgcctatcttcccatgttggaaggatcacagagcatttgtcaagacgtgggtcaatctgcagttgaactttgtgtatgtggcctatgtggatacttataatatcattgggcacctccatagagctgtttcccaattgaccaaacatatgggaagcttcagagcttcgaatgacccttcagagtagtcctgagaacagtgagccttactactcctgcattaatcagtcattggatgatagccttctcagaaataagtcatgaccttgtgcaagggggctcttcatggctgggaccacccctaaaactgagagctgaaggctgtctgccaccagcccttccacctgctgggacaagttctttattgaagggaaatctgagtagttcatcagcgtccatcacagtagtcaagccgttcattcttccttcttatgacaacattgtgcttattgttatgtaatccctttccagaacattttaggttaagttttaaaaataatgcatataaatagacaattcaaatactggggaaaaaaagcttgcacttatattgttatagaaatgtgcacacttaaagagctgatttcttctgggtatttacataactttatttaaaaatccatccatttttaattagctgtttttaatatgcagttagctaagatattataagccatatattaggctaatggacatttaacagcttagttaagttcttttaatggaaatgctgacaaacctttgtctgtaattatagcaacactgtgattacagaaggaggtgcctctccttgttgtttgcagccctaaaattccatgtggctataagtaacaaagtccattattagataaacacaagtcatacttggcattacttgcattactcgtctccttgctttatttgaatcattttttaaagttgtaaaatgtttttcaaaactcagaatagtggccagttaataatatgattcctcttatattatgagattttaaaaaatagttcaccagtttctggtggcctctatacccattggcaagtcctagccattgtgaattaagtaaacaattctttatggaaattttttaatccttaaaccctataagtttttattcatcatgtcaggtcacttgtcaaagggtttaacattcagaattcaacaaaagtttatcaaacacctattacaggacgtgcaattttgggcgcactgggatttcagcaattaacaatcaagatatgatttgtatcgacatggatattacattctctcacaggagacagaaaacaaaataactagaaaatatacataaagagactttaaaatggggtaaaattacagattgtgacaggatgaccactttggttcagaatatctaggacatttttttctttttttttcccctccctccctctttcttttttttctttttctttttctttcttttctttctttttctttctgcctttcggagtcttgctctgttgcccaggctggagcgcagtggtgcaatctcagctcactgcaacctctgcctcccatgttcaagcttttcgtgtgcctccgcctcccaaataactgggactagaggcatgcaccaccaggcccagctgatttttgtatttttagtagagatggggtttgaccatgttgcccaggctggtctcaaacttctgacctcaagcgatccacccgcctcagcctcccaaagtgctgggatttacaggcgtgacccaccaggcccaagcaaggacatttttttctgagccatgttatttaaacagagatctgaatgacaagaaggggccagctctgtgatgtaggggaagaaaaatatgttccttctacccttctaggctgcccagctggagtcctacaaagttagagtgacaaaagacagattaacaagaggaaaagcctagaagtttattaaaatattcagtgcacatacacctggtagaaactcagtgatgagtaactcaaaggggtggttagaatgttgggtttatatagcatctgaacaaagaacagtaaacttgtagagaaatgacaaaacaaagaaaaaaggggtttaggtatttagggttgccaaactgtaggaaggtaaatatatgggagaaacatggagtatagtttgtttatgccaagtctatcttgagatcaacttttcgtattcttcatggccataacaatttcccaggagagagggcttatagcagttatcatttctcagaagtttctgcttttatttagacaagggaagcactgggaaggcttctttttgcttatattgattcttacttgcctctaactaaaagtaatctttatgtcaaagtgccatattttggagtggtatatattgatctcctataataacaatcaaaaggaacagtattctaggcaggagtaccactaatgcatagtgtttggtgtaaagacaagttaacatattcatggggcaacaacaacaataagccaatatggctaagacattgaggatgagtgagttggagaagtaggcaatggccagctcatataaagacttgttcgtttttataaattgtttagattttattgtaattatggtggcaagtgattggagagtattagcttcactttgactggcttatcgaaaacggaatgtagggggtgaaagtggaataaaaagaccagtcattaattgagtagtccgtgtgagagatgatagtggcttggacaaggacgattgtactggagagattgaagcgactgatttcagatttgtagtcaacaaggcttaattggtaggagaaaaaaataaatcagtgttaactctttaatgtttaacttgaataattatgatgagggtattaccatttattgagatgtagaatattataaagtaagagcagatttgttcaaaaagtatcaagaatctttatttggacatgctagtttggggatgcttattagagaccctaggaaactgaatataaatgtggattttagagaagagcttagggctggcagatgcacattaaggatctgtctagagccatggcgctagagacctccaggagaacataaatagtctcaagatcaagccctgagacactcagatgtttagaagtggaacagaagagggacatccaatatagaataccaagaattaggaggggaatcaagagagtgtggcaatatgaaagatacaaaaagagtgttgaagggagggagtaattaataaccagcatgttatgaggggctcagtataatgaaaagataagtgactattggatttggcaacatataattttttggtgatctggacaagagcaatttgaacagaatgatggatatggaaggtccagaggagtaggctgagtaaataatataaggtgggaaaatagatacaaagattatagacaactttttcaagaagttttactgtgaaggggcacagcaagctgagacagtgaggataaataatagactcaaggatggtaactttagaataagaaatttcaatctgatgggatttaagtgttagcaaggaagctttaagaagttattttccccattagaatgatctgaaaaatgttttagaacattcctcttatattctattttatcacatttatataactttcagagaattgaaagaggtattaagttattatgaaattttctgagattaataagataacaattataggatgttttcttttagttgaaatacacctactcagcctaatttttataacttcttactgaagtataatatacttcagtagaaaagcatgcctaatataaaggtgcagctagatgaatttgcacaaactgaacacatccctttaaccagcacttagattaaaaacagaaccttgatgatacctcagaggcccccttctgccccttttcagtctctccgtgctacccccatggataagcattatcgtgatttctaataccatagattaattttgccagtttttgaattttatgcaaatggatctatttcacctaattgtaaatatataacattgtcatagcaaggcactcattgccttacactgaaaattacattgactctttgccacaagcttagacttgctttctcattttattatcatcaagcctatagctttcacactataccttgttcctgctcttccctactctatttcttggtagatattctatatcagtcttagagtgcagtttgcagaacccctccatcagaatctcctagggagcttgttaataatgcagattcctaggcccctcccatggtttatgaatctgagagtgaggcagacaagactataccctctcatgcctctataatgtaataatgtcttcctagaatgttctttgctgcatctcttattaaagaaatcttatgggccgggcagggtggctcacgcctgtaatcccagcactttgggagcctgaggcgggcggatcacatggtcaagagatcgagaccatcctggctaacacggtgaaaccccatctctactaaaaatataaaaaattagccgggcgtgctggcaggcgcctgtagtcccagctactcgggaggctgaggcaggaaaatggtgtgaacccgggaggtggagcttgcagtgagctgagatcacgacactccactccagcctgggtgacagagcgagactctgtctcaaaaaaaaaaaaaagaaagaaagaaaaaaagaagtcttatgtttcctttatggccagagcacaacattgtcatgaagtcatctaaaatttcccactagaggtaacatctccttcccctgtctagctcttttaaagcattacctccatttgccttgtatcatagctgcttgtacacctgtctgtctttccgctgaggttataatcctctggagggtcatgactttgcattcctttgtgtctcccattagcagccagcacagtgccttgcatactgttagttctaaataacttctctctctctctctctctctttttttttttttttttttttttttttttttttttgagacagagtctcgttctgtcacccaggctggagtgcagtgcaatggcatggtcacagctcactgcaacctccccatcgtgggctcaaatgattctcctgcctctgtcttccagtagctgggattataagtgtctgccaccacgcctggctaatttttgtatctttagtggagacggggtttcaccatgttgcccaggctggtctcgaactcctggtctcaagcagtctgccctactcggcctcccaaagtgctgagattacaggcgtcagctgctgcgcgcatccctaaataaacttttttttttttggcatgaaatctgtaacactggaaagatgttattgccttagaataattaagagattaaatgtagaatctcaaaaacattcatttttttccatgaaaactttaccaggcctcaagggataggaaaattatgggtacagaattgagaatctgtaggaacttgcaagataaacaacggtttcacaagaaagaccttgttggagagttaaattttcagacagttgtaataacttcacattaaagttttgtcaaaaaataagtatctgcatgttttgtttgccttccaatgccctcattttatttgattttttcccataagtaactatagtgaaagcacgaaaatgtgtttctgtgtttgtgtgcctgtatgttaattgtgactgtttctattgcattgttattgcagaacctaggcacgcactctgtaggcttgggtgctttctccaactgaaaaaaatcctacatatggataaattatttttacagccagtgtttaattttacaagtggtccccctccttctgtttttaggatggcagagagaatacatatttacttaccattatcacttactcatgctttgagcttgaaggaaatgagacagaaaaatgaagtaacattaacttctctctggaactatgtttctcatattagagctttatctgaggagttcacttcctctctcttcaatgctttgttcctctccagtcgattcaaatgtcctcttaaagcagaagttccgaacctctttctgtgacttcaggagagcatgagaatgtaaatataagttttaggactaaattttcaaagactttttccactcagctctcttttcctcttcggtttgttgttgtcgttgttgttgttgtcgttgttgttgttgctgctgctgctgctgtttttccccttccacttccgtaactgagctcttagggtccatctggaatctgattgcaattaaaaaaaaaaaagtttatttttacctccttgtacgtgctttctcctaaagcaggagtcagaagccttttttctttgaagggctagttagtaaatattttaggcttgtcgtctttgtcgcaattactcaactacgctgttgtagtatgaaagcagacaatacatacctgaatgagcatggttttgttcctagcaaactttacgcacagagaaatttggatatcgtataatttttatgtgttgcaaagttgtattattcttttgatttctccccaaccatttaatatgtaaatcccattcttagcttgtgtgccatacgcacacaggcagcaaatgcgagttgtcacacaggctatagtttctgactttatgtcttaaagtaaacagtaataatcattctctttttccaaacagtccactaatctccctttgtattcagcccttgcatagtaaacgccgtttcttcatcatcctgatttttattctgagaaaatactgtatattgttcccatgcactagggttcggggaaatttaaaaggatgtaggatctccttttcattggtcctaaaattgcactggggaggcaggtcatgtttatgaacagataaatagtatcataatataatcatgcatttctatggctagcatttagaactatagcttttgatgtcatgtggtttttatatggttgattatttttttcttatttataaaatgaaaaagtttgagaatttttcatctccttaatgtattcccttatttgagggaaaagtatttacctactacataggaatttatcttaaaattttctttgtctatctatttttatggaatataatcgagcaactattttactaattaatactttaatatcattatgaaaatgttctcatatttttaaccttataagatcagataattgctatgccaatctatggttgaaatgggttcttatacttaacgctatgctctttcttctgagatgtaaaaatatgtttaaatcagaatttatataggtgtcaattcaaaatgacagtagttcattattttgattagtataaatgttcacaactaattctattctcttatctattaagtcaccaaataaagtatatttgttttaaatatttaacagtttaaattattctttgaaaacttatgagtctaaagtaagaacaattaacccattcattttgcaagtgggatagttgaattttacttgcaatccagggatttttgacagtttgaaatatacatacataccatgtatgtttaggaaaacatttaaaaagagggggttgtaaaataataatagttcttccatgattttttagccataatgtttataatataaaatatgtatactcttgttattgaatgtagtatgtttctaatttaccagaaggcaagagaataatcctggagaatttctcaaggcatcttcgaactctttgatttattgctcacatatagtaatttgccaaatgacgccctagtgaactgaaagaattaatgccccgtcctaagtcactttcaccgagggactgaaaacctgcagcattttgccaattagaggaggaaacaatctaccttgcagagtcaggagtactggataaaggagctaagagtgttgctttttttccccttcttactttaaaaatcccaattcatcccatgtctttcttaaaggctaagtgaagtagtaagtacgtttttgcaacatacgaatttagcagactggccttgtgtttatttttggccggaaccattacacttatttccaaccctctcctttatttgttggttgataatgggctaattttgaatctttactgtcaaaagaacattaagagaagcagccctgcctgcatcgcaggctatgtctgtcctttgccgagtattaaacactaaaaaaaaattaagaaaatactaacaaaatgacaaagcattaagaaaataaaactagatgttaaaggaaatgagaaaataggaaaggatgctgtacctggagtgattttttttccccaggctacctaagatgatcaaaaaagagctaatttctcttaggtttctattaaggaattactagaatatcgggcacaccaggaaactttatcagtggacctgtcctgaaccaaattttcttaatgtatatatgataatttgttaccacatcccagattattttacaggaattaaaatatatttgaaacactgacagggaaaattgggtaagacattgatagatactacaatctgtacttgaaactgcactcaaggaattcgttagtcaagaaagaacacaatgactgtgggcccctctgggttttggaacctcttttgtaaagcatttttttttttcccaaatagaagatattatttttgaaaaggttaaataaaaaatctttgttcactatatagtttcctcctaaggagtaaattaatttatataaaatattgcaatataaataacaattttaaaatctcaaaagagcagtgttttaaaaataatgtagaaacattaagaaatgacttcaaatgataagaatgtcattggagagcaaagggtttttaatattacatatcgtggcacgtatatcagcacccaaccgctcaagatacagagttctttacaaaaatcaaacagaaggaaatgtgccaccttgttcataaactatatttaataataagccaggcagataaagtcactttcacaaataatgagcaagcccatggtaatataattcatttacaataagatttatctcatggaattcttagactgtgctttgaaatttaaataattctgataaatgccaacagaatagagaaatcaattccagagcaattactaacacgttgcattacctttctaacattaatatttctcttcatacatatcattgaagagaaaatgaggatggaaaataaaaagatcaggtaatatatttgctttctcatctagggttgttatgatcttcaagatgaagttttattttttactcctagcaaatgatattcttttttattttagtttttattattttatttttctgtaaattattggggtacaggtggtatttggttacatgagtaagttcttttttttgatatttctgagattttttttttattctactttaagttttagggtacatgtgcacaacgtgcaggtttgttacgtatgtatacatgtgccatgttggtgtgctgcacccattaactcgtcatttagcattaggtatatctcctaatgctatccctcccccctccccccaccccacaacaggccccggtgtgtgatgttccccttcctgtgtccatgtgttctcattgttcaattcccacctatgagcgagaacatgcggtgtttggttttttgtccttgcgatagtttgctgagaaaaccacgaggtaccatctcacgccagttagaatggcgatcattaaaaatcaggaaacaacaggtgctggtgaggatgtggagaaacaggaacacttttacactgttggtgggactgtaaactagttcaaccattgtggaagtcagtgtggcgattcctcaggcatctagaactagaattaccatttgacccagccatcccattactgggtatatacccaaaggattataaatcatgctgctgtaaagacacatgcacatgtatgtttattgcggcactattcacaatagcaaagacttggaaccaacccaaatgtccgacaatgatagactggattaagaaaatgtggcacatatacaccatggaatactgtgcagccataaaaaaggatgagttcacgtcctttgtagggacatggatgaagctggaaaccatcattctcagcaaactattgcaatgagtaagttctttagtggtaatttgtgagatcctggtgcacccatcacacgagtagtatacactgcaccatatatgttatcttttgtccctcggcaccccttttctaccccccaagtctccaaagcccattgtatcattcttatgcctttgcatcctcatagcttagctcccacgtatcagtgagaacatatgctgtttggttttccattcctgagttacttcacttacaatgatagtctccaatcgcatccaggtcattgcaaatgctgttaattcattcctttttatggctgagtagtattcatatatatatatatagacacacgtacatacatatgtatatataccgcagtttctttatctacttgtcgattgatgggcatttgggttgatacttgcacacacatgtttatagcagcataattcacaattgcaagtgatattctcaggaagcatgatgtaagtgacagagacttactttgtagactgcactcattcacttgttctctgaatgtgctctaggcagcctgagtttctactatgtcagtgttacatagatgagaaaccccatgggtggtttccacagaggctgcaatactatttttgataccaaaaatctgtttggttttgtgagccccagatgcccatatggaaaactgaagtgttgatacctctttgtagccctctgatgaactgcatggttcaccttcctcagcagtttgagcggggtggggagagcgcctgcttcctagccatccgattggcctgaatcatcaaaaatgctatcatgaaacaggttctgtttatctgctccagattacacccatcatgttctagagtgctggtttcatgcttgaatctagatcaagcctgctttcctcccctgcctgtactccctgtggctacctacagtcctgctgctgacagataatctaaaccaatagcacctaattagcctatttgctcatgtgttttttccatcgtggtataatgtcctccttgtcaatttagggtgaaaatgtagcaacacgttgctgatggtttaatttctggaatgcaggtaatgaatgtgtttttgcttatccaagtcttcccatcagatgtcaaatatagaagaacagtgttcagaggtcctaaatttaaattggagtgagaaattcacagcgcccctgaactcaggcaaaatgcactctgacaagtcaaccagatattcacagatggtctggaggatttgaagcctaatttggtgaaataaaattaaatgagtgaaattgtatgcagtcattaatctatcaccatacttaaaatgcttcattgaaatttcttttactgcttcaaatgaaaaaagatcaaactatgttatagaaaagcattcaaaacccttacataacatagataaaacttggttggagacttacagaactttctctgctgcttcgagaaagttacagtgcccacaaatctattgctattagaatattttattgtattcaacactcaattctaccataattatgtatatgagaaaaatatttttacctataaaataattattattaccttttaaaaatctgacattcttccttttttctaaagaaacatatttagatttagcttttattttatttttgtgttgatacatagagattgtacatatttctaagattctagtgatattttgatacaagcgtataatgtgtaatgatcaaatcagggtaattgggatatccaccatctgaaacacttatcatttcttcttttcaatgccatcataccaaaaggaagtaaatagaatttcaaatataaggacagccatgattttacatacatgcctacgattccaccacaaaccataattacgtcccccaaacttttaacatttcagatactttgtcccaggtatttcatgataaggattgggctatgactctgttacagaagggccaaatgactaaaatgtctctgaacaatattgattgcaaatattctacccagttgtcaggtcaatatgttccaattcggaatttataacattgtatctctactcccaaaccatccaatctcacctacctcacttccatattatggtgggtgatctcagattatatttaagctcatggttacttgtcaagtagatatggagtttagcctaacttttgaaatttatgctgagattacccttctcattatagaattaagtaggcagtttccaagtttagatttagcaggcagtttttttcaaatcacttaaaagttatatttttttagggcattgaacaggtttgaaatcctaccaagatgtcatgtacacatagaccaatagaacagaatagagaacacataaataaaactgcacagctacagccaactgttcgtcgacaaagtcaacaaaaaaataagcattgggaaatggattaaagatttaaatgtaagacttcaagctataagaatcctagaataaaatctgggaaataccattctggacattggcttgggaaagaatttttgactaagtccttaaaagcaattgcaaaaaaaaaaaaaaaaaaaaaatgacaagcaaggacttactaaaataaagagcttctgcatggcaaaataaatgatcaacagagtaaacagacaaacaccaaatgggagaaaacttttgcaagttatgcatctgacggtggtgtaatatccagaatctatgaggaacctaaacaattgaacaaacaaaaatcataaaacatcatttaaaaaatgggcaaaagacatgaacagacatttctcaaaagaagatatacacgcagccaataaacatgaaaaatgcgtcacatcactcatcatcagagaaatgcaaatcaaaaccgcaaggagataccatctcacacccgtcagactggctttgttaaaaagtcaaaagacacccaatgctggcaaggccgcagagacaaggggatgcttatacactgttgttgggaatgttaattagttcagccactgtagaaagcagtttggacatttctcaaagaacttaaaatagaactatcatttgacccatcaatcccattactgagtagatatccaaaagaaaacaaatggttctaccaaaaagacacatgcactcacatgtttgtcacagcactatgcacaatagcaaagtaatgggatcaacataggtgtccgtcaacgttggattggataaagtaaatgttgtacacatacaccataaaatactatacagccacgaaaagaagaaaatcatatcctttgcagcaacatagatgcagctagaggccattatcctaagcaaattaacataagaacagaaaaccaaatactatatgtactcagttatgagttggagctaaatgttaggtacttatagaattgaagatggcaacagtagaaactagggactaatagaaggggaaaggaaagggggagacaagggttgaaaagctgcctattgtgtactatgcttactacctggttaatgggatcatttgtatcccaaacctcagcatcacgccatatatccaggtaacaaacctgaacatgtaccctctggatcttaaaagttgaaaaaaaaagatgtcatataaatattcgtggtcactaaaagtatctaatgtattatacataaaaataaaaattgggtgaattggaagtgtattctttgtatcaagtcatgtcggagatcctattctgctttgatcacagtgtgaattcttttgcatttttgttaccagtcacttctttatttattgaactaataattacatattctgataatctgtcagaaagataaaaacattctttgtccatgtgtctgaaaatttttaacctatttttctaatgttttaagtgagaagagcatgttaatactgaaattgtaagcagtagactgaaaaatcatcccaatccatgggttatatattgaattgcttttaactgtattactaaatattaagcttaatttattttatttctacatatccccatttccactataggtgatttgtatgaatttaggaacttccttctctcatccatttttatattaaaactcagactttctaaaacaatatttctatccatccatcgttggtaactatgtactgacatgttttgtgcatccgaaaaatgttagcattagtttgtgcgcacagaagtaattccagtcaccatatgatgagctgatttatttatttcgtaagtgtgttcattattattatctcttcagcacccaaatatataggggacttaatgatacctacaagtaaaaacggaagacaaaaacgccctgctctctacagaggttaaaatgtttttgcaacagggctctagatctcagctgtgaaagtagggacgagatgaggctaggcatgcagtgtcagtataatacaatataatcaacatgtcagcatctaatgcaggtgttgcaaaacaaaatgtacacatgggtagtcaggtaacagaaaagcatgaagtagtaagggctatctatgcaagaggttccaagctgactatatactgaaatatttaaacactatgtggggcaaataaaatggacattagaacagttcgatggtcagttggggacttctgctctttcttccagtctctgaacatatcttaaagccacaatcatctatttttatttattgttatacatttatttataagccagcacccctgtgatttaagttctgttgaaatgctgagttggaaaagatcgatggatgggggaaatttagtgcagaggttttgccccaggttcaaaatcctttataaaatattaatacatggaacaaatattgaacaattaaaccactgataagttaatcaatctgattcaaagtacacctgtgaagagggacatggcaagaaaaatattacagtaagaactagaaacattccttcatggctgcttgatatggatatgtcatgtttaagaaaattcttctttagactgttgagattttttttcctgacaaagaagattcactgtcgaggaaagaaagaggtactgtgaaatttgttattgaaaacatgcacatacttttgtcagaatgagttaaagagtgaacaaaatgtgcctattacttacgtgttgtgctgttttaattcaagattaaaatatttaacgtccacagacaagaccacttttatatgaatattatttttctgctttattgctcaattttattaccatttcaaaacacccgtgttgctttctatggccaaagatgtttagcacttttcatggttatacttctgtacagtccaaaatacaacacttactttacacatacacaaacatccaatgtattttgttttctgtcaagtaaagacaatgtctgtgttattaagttaaatgtcactttcaaatacaggatatgttgatattagaatgttcaactttatttcctcatttaagcaaattacagtgtgaagaatgtaactgcagcaatttataaaaatcatatcacattcaattatgagagcaaacttgttttgtagacttgaactagtttcaattaatcttggagttatcatttcaaaaattctaaacagagagaaatacggagtgtaataatggtaggtctttgggtaagctgcttccaggaaaagaaagcaattatatatgttcacatagcactgacaaggagaaacaaaactttggacggcaaagaacttgcattagtctttttgacatgttcctgtggtgtgatttattacgtagacaatcagctcaacttctcaagtttgatatccttggaatcatttgaaatttaaattttaatgaaaattcattaattccaaggccaaaagaagtgattctaattgcttttgagaatcagactatgaaagaattctttggcaaacttgcactgtcttttctcttttatcattggttgcttcgtaggtacttaattgaaggtcctctgattatcagcacgggctgacatcagttcactccatgcattttaaacagtaggccagatgtttaaaggatcagctgaagcatcgatagcatgctagggtgaataataaaattttcattatctacaagaagcaaataaaaagcataagcattttcccccattatcctgaaggagaagatgaatgcctaagcaacattttaagaatgggttgagtgtggcctgtgggaaaatttgggtagaaaacttgtagttagctaatgtatatactgtttgcctctttagctcaccatatacccacacacatgggcatgcatgcatacagacagacacatacaatacacacaacaaacaggaaattcagatatactgaagaaatgtatttaagggattactaagtttttgtaaataaaatcctttaagatgctgagaaacaatggaagagaagtaggacatgatggctcatactttcgtaatttacttgtttaacgtttgccaaggtttaaattaatgtagatgtttttgtggctaggattaatgatctaacagtttggaataattaggcacttttatcacctagaaagcccagaaacccagcatgcaaaaattctggtatgtctgcattttacacttagatataacagagaaatgacaagtagtcaagtggatagagaaacgaatgattcttcacacatgcacacacacatagaaattgtctttttaatagtattttaatgtaacacatttatgcataatttctccatagtgtttatcttatagtgaatatgtgatgaatagtctctaacattagtggttttatagattaaacataattaaggctttatatattaaagagtcaattggtgacattctaatataaacatgtttatctcatatacattgaaatattagataattcattcgttgagaataaatcgaatgagtcaaaacttttaacctccactttgagctttgtaatagtatccactgaaaatattcatgaaaatttttaagtcatttctatttatatattcagtccaaacatctcacaagtttaaaatgtaaactcaagaatataatttctgtattctacaattggaagcatccatcatatcagatgaacttatatagtttgtgaaattttgcaaactttctgtttagtaaatcttaatgtcaaacattttaacttccaggttgtctttcttttcagttttaatatccgcgatctttgtatactcgttgaatggattctcaataagtaacccacaaatatatatacatactatgtacctacaaaaaataataaaaagtaaagaaatcgacacttatccatacctgtcccatagtaataaactattcataagtatatttgaaagatatgagaatcataaaagttcgtgtttgcacccttttgtgcgtggaatcctaggtttgcattttgtggatctagactttttggagtgtggaaataaatgaaacaaataatcgagacccagtcttatattcaggttatcattttactacataaagcataaataacatttgcagtttgtttctatggctagctctaaagtcttagcaacgagaacattatagaaagacttcaactgtagcttccagcagaacttctgaggttccgtttatggactaagcagcagttgagggggacaaaactcataggcaattgatcactccaaaggatagattgtcttttctaacctaatcaaaagatttatagtgaaggcatattcagattttgttgaaggatatggatatataatcatgtgtgtgtgtgtgtgtgtgtgtgtgttagacatacttaaaacattatttgagtagaaaattctgcacaaatggaaaagtataacatgtgttatatccacacatgttgagcatttacctggctgaaacatcaaaagctgaattgacttaattgaatgttgaatacttaatagttactttgtagtgactcactattaaaacattatctcaagctttgtcagaattaatttttttaaaaaactcagattagtgtcaggtttactgaaacagcagatctgaaattactgtgtttttttttcctttcaataatcagtttctaatccaaaattgaatatcagttccaactctacattcagtttctgttttacttgtttggactggcttttggttctgttttccacatagatcctctctgtgtaagacaaagccatttgtgcagattaaattttactgagcgtgttaacctatttaaaacattcatccaaaaagactagtatgaattcttcatatggcaagctgcttgttttaaaacttccatttattctaaaatcctttttacttatactttttaagaaacgtattcccgatatacaaaagtaacacatgctcattaaaacaaattaaaaatagtattgtataaagagctgatacatttctgccttgccccatttaactttcttaagtgttcatgtgaatcatccattcacatcaagacatttatctgtattcatatgaacgtgttttaatatatataacatatatagaattttatataaactttccttttaaaatagaaatgaaattatatgatatatttattctgtgtctagctcttgtcacgtaattattcaagaacatatttctaggttaatatctgtattcttaggtagcattcactaactcctcatctacttgttttcttccattctaattgtgtttaacatttcttcatacaattggttgtcatttggtcttctttcatggagggtgcataatgttcattctcaccaattctttacactttacataactgcttgatacgaagccagaccttataaatatcaacaaagcaggaacactgtaatcagctatcagtttcagttgagctgaatgaccctgaatatgtgtacacatattttccaggagattttaaaactgacacctcagatttctaagacctggagaaatcagcatgagaaacattgatctatattattccgtgaaatgatttcactaaatagtgaagcatctcccacatgtggactctgtaatttattagaataaagagttcatgtgcttctgaagaacttgaactactcttctggcctccgtacattggtttcttagctataggaaggctgagcatgtttttcctatgcgtttcctttctagctcatcattttagtgacaaaacaatctttcgtggtgttgctctagctatagaattgtttcagattcatttgaccaaaggtggcaaatacaacagtcccaacaaaaacaaaagacctattacagaatgatggaaatgaccccagggaacaatggcacctccacatttcttaattccaaggttataagcagtggtgtggacaattctcaattccaatgctgaatcgccttctaatttcaaatacctgtgctaaaaattatttacgtctactgaaataatgaactggaccccaccaggaatggccgatatgcttgtagtcagagcacaactgtagaaagaaaataacattttaatttatagaggtatgatgatagctgtttcatactgttttcagaacgatgaatggcctgctcagtagtttcttgtcatcgtactgagacactttaatttcttaccagctgagatgaggaatacgagcccagtgtgcaggtgaaattggttaacaggagccattaaaatttggaagagtcagaatagcatcaatcaaaatgctttcagtgtaggaagtaaacatgtactagcctgacccacctgtcttttcttttaggtatgttggtaatattacaatcattttgaggtatccataaacaactgcttagatctgaagaattgtatatctttctttactctgccctggcctggggttatggttctcattgagctctaacctttcagaaaaaaaatgtagagaagtggttcaagaagaatgctttatcttgcttcataaaaatgatagtgatagttttattgaaggcttactatgtgccaggccaaagtgcgttttattatcgttcccattttccaggcaaagaagctggagcacagagaggctaagtgagttgtccaggatggctcagctaacatgctgcagttgggatttgcacccagaccaacttcttttcaaccactgtcccatcctgtgtcttctctactcaaaaagtgtttcagctccaaacctgaaactttaaagaaaaggaaatccttagtggaaagactaggttttagtcacaaattatctccttccttacattatttgtctctttttcaaatactccaagctttgattaaaactgtctatcactaggaacattgtagaattgctaaggtggaattgttaaaagaactcaattccaattaactttgccattgattactgtgtgttctggaggggtgttctttctttcaggttaatgatgctttattgtatatctcaaagattaaaaataacaatgaaggaagtagcaaaccggaacttctctcacaatgcatctttcaatctcgtgctttaaatgaagataaaatcatggctgtggtaaggttgcaggaaggatgatatagattaagtttcttgcaaactgccctctgaattttcaatagctgtagaaggtattggttttccaaaaaattgacaaattgaggattcattcagcagtttttttctaggtctcttaccagaaagtgatcactaaaaagtgtagggaaaccactcaaagttggatagatcattattttcacttaagcattttaatttcttgaaggagctttataatgcaacaaagaatttacagtcctgtgtcaccgcttaaattttctagggtcatcagtaaactcagtggaaataaattagttcatgaatataattgacccttaaattctgtcactgtgcaagtaatcggtgggtctgctggatatggctttcgagcagacaggtcaacttcttcaaacagagaagaagcatagcataaattgaagacaaataacaaactacttgtttcctccttctttggcatcaccctatggatggagtatgcatttataatttaacacaatcaagagatctttattatcctacttttgggtacaactgcttcgtttctcttttgaatctctacagctatttaaaaatctgttttgtaaaattctttaaaaaactaaaacatcagattcatatttcaggtatcttactatcttataccaacttaagcatccagtattatcacccacccttcccctgagtgaatccttagcactgggctcttcctgttttatccctgtgcatgctgagctctttctggccttcaagtctacttccgttgcaactgttgtctgaatggtctctctatgtccttcttactctctaaatatttcggaatttaaagcctggaataatctaccttagtccaaaagatatgctacactattctagttcacaatgatctcacactgccgttgatacacaacatttaatatcaacttaatatctatttcagttcattacgaggtcacttatgctacatcttatattgttgccttggacttttattatctcttcatatatgtgtttatggtgctcccaccctcacgagaagttgcaaataccatgttagctgtctgatggctttctatgttgtcaggtataccatttcccaaccagttggcattcaatgattaagttcattaacaaagaattgtatgtgttgaaaaagatgtttttttcttaatgaagcacttgtttttatttttttaatgaaatccaccctcttaataaattttaagtgcacaatacagtattgttaaatataagcaaaatgttgcatagcagatctttataatttttttaaccctacatgcctgatagtctatacccattgcacagcatctcaccatttcttccctcctccagcccttagcaaccaccattgtactttctgtttctataattttgactactttagatacctcatgtaagtggatgcgtgcagtatttgtccttttacgacttgcttattttatttagcaaaatggctacaagattcatccacattgtagcatatggtaagatttcctttttgtggcagaatgatattccattgtatgtatataacatagctttatacattcccctgtcaatagacatttagtttgttcacacctcttggctactgtaaaaatgctacaataaacatgggaatgcagatatctcttcaagatcctaaattgaattcgtttagataaatatccagatgcgggattgctagatcttatggtagttatattttttatttttttgaggaaactccatattgttttccacaaaagctgcacaattttatatttccaccagcagtctacatctccaattttcctacaccttcaccaacacatgtaatgatcttgggctttttttttttttttttttaataatggttatcctaatccgtgaggtagtatatcattgtggatttgatttgcatttccctggtagttagtgatgttgaacatcttttcatataactgttggtcattttaatgtcttctttggagaaatatctattcaattcctttgttcactttaaaaattgggttgttcgaatttttgttgttgttgttattacgttcctcatgtattttagatattgacaccttatcagatatatggtttgcaaaccttttctctcattctataggttgcttttaattctgttgattgtttcccttgctttgtagaagctttttagtttgatatatttctgcttatctagttttgtttttgttggctgtccttttagcgtcatatccaaaaaaaattattgtgaagaccaatgtcaggaaatttttcccttatgttttcttctatgagtttcatagtttcagatcttatttttaagtctttactccatttcattttgagttgatttttatgtatagtttaagttaaaggtccaattccattctttgcaatgtgtatatccagttttcccagcaccattggttgaagaggatatcctttcccagttgtgtattcttggcacccctattgaaggtgatgctaggtttatttctgggatctctattctgttccattggtctatatgtctgcctttatgacactatcgtgcgctcttgactgaggtagctttggtaattcattttgaaactagcaagtgtgatgcctccagtttattcttcttcctcaagactgttttggctatttggagtcgtttgtggtttcatatgaattttaggaaatttaccttatttctgtaaaaaatgcgattgggattatgataggaattacactgtatctgtagatggtttggatatatagacttttaaatgacacatcagatgtatttccatttatttttgtcatcttcaatttctttcaacaatatttcatagctttcagcacacacatcttttaccttcttggttgggtatttactaagttatttattctttttattgctattgtaaatgagattgttttctaaatttcctgtttttatgttgctagcgtatagaaacgcaactgttgaatgatgactttgtatcctgcaactttgctgaatttgtttattggttctaaccatgtctctgtgtggcgtcactcttaagattttctacgtatcagatcatctaatttgcaaacagatataattttacatcttcctttccaaatttgatgtattttatttctctttcttatctaattgttctggctagtacttctggtacgattttgaaaagaagtggcaaaagtgtgcattcttgtcttgtttctgatcttaagggaaaagattttcagtcttttgccattaaatgtgatattcactgtgggtttttcatatacggtttttattatgttgcggtaatttcgttctattcctagtttgttgtgtgtttttatcatgaaagtgttgaaacttgttaagcgctttttctgcagctattgagatgaccatagatttttagcctttgttctgttaatgttgtgtatcacactgattagttttcataaattgaaccatttttgcattccaagaataaatcctatatggctctcgtgtataatcctttcaatatactgttgagttcagtttgctagtattttaatgagttattttgcttctatatttatcagcggtattgttctgtacttttctcctagtgtcttttattgactttgatatcaggatactgatgccccttgtagaatgagcttggaagtgttctcttctctttaatttttctgaagaatttgagaaggattggtgttaattcttctttaactgttcattagatttcaccagtgatgacatttggtcctgggcttttctttgttggaaggttttggactactgattcaatctccttactagtttcggcctactcagattttctatttcttcaagattcaatattggtagattgcatgtttcaaggaatttgttcatttttttctaggttaacatacagttgtttacagcagtgtcttataatcatttgcattctttttggataccagttgtaatgtctcctctttcatttctgattttacttatttgaattttcctttttttttttttttttttacttaatctacctaaagatttgtcaattttattgatttgtttttaaaaaaactcttagctttgttgatttttctattgttttctatttcaattttggcttttttctgatctaatcttaatatttccttccctctgctaactttgggcttagtttgtccttctttttctaagtctttgaggaagaaaatggcaaggacatgactttctttagcagttggaaggacaatgctgtaaatactcaaaaattaattatttttatagtgacaaaaacaaaataaaaaacacttcaaagcaaatgaaagtttatcatttaatttatcaaatcactaagcagactgcttgatcagagagaagatactcatatgatcacataaaactgaaagattaagaggtaaggacattcatgttatcattacatctaactttcttatttccaagatggagaaactgagggttggagaaaaagaaagatttctttgttagatacaaacagacaggactaaactcagtatagcagcctcctaaattccaaagtatcatgatactgtgattttatgcattcttcagaaaaatagtagagccactggattctggcaaagaagttatataaaatgtcaagttcttcctttgcctcagaaatgaagttttatgttccaaaattgattgggaagttctccttatacctcacatcacgtctactattttacattgtttacttttgaagaatttttttaattgacaaataataattgtacatattcatggagaacctagtgatgtttttatatatgtaatgtatagtgatcagatcagggtaattagcatatccattatctcaaacattggtcatttatttgtgttgggaacattcaacgttctccttctagccatttgaaacttctatattattgctaactatagtcaccattcagtcgtatagagcactagaacttatttctcctatctagctataatttatttttaaatatgctttttgaatctgttactataaattgaatgtcacatcgttttgaaaatattcttaatttatgctcaacaggcaagattacacacctgtgataatatctttaatttaaaacattactctgtttaatttaccagaatatggaaccctagtcattttagaggtggagcaaatttcagtgataatctagtgcaaatttctcatcttatgaatgaggagattgagtctgatataagggacgagattttcgtcaatgagcagcttgttaacattagctctgtgatagaacacaggcacttgtcctcccaggccggtgtttcttctactctatgatgggctgttttgttgtagtttttaaacagcagcattttcaccatgcatagttttcttccaaagttcgttcttaacgtttttgcacagaataactagattttggaagtagaaaaaggaaattctctttgcatccttgtatctctggttattttctttgtcctttgatctctctctcctcccctcccctcccctcccctccccttcccttccctcccctctccttcccttcccttcccttccctcccctctctcacacattagagaaagagttaaggtattaaagaatacataatactattaaatttccttcacatagagaaaggaatgaaaaaaagtgaaaaatggtcctcaccaaatgtccaaacttctgtaggtcatttccatagtatcagcaatgtcctgtatggtgcctcggggatatgtaagcaaatgagcaagtggttagctaattctagctttggcaaacacttgttatggcttacttgaggagaagtcacttctccaaagtgaaaataatgtgcacaggtcaattagaatttttttgtagaaaaggaaaatactttgtagggacatggatgaatctggaaaccatcgttctcagcaaactattgcaaggacaaaaaaccaaacaccgcatgttctcactcataggtgggaattgaacaatgagaacacatggacacaggaaggggaacatcacacaccggggcctgttgtggggtggggggagggtggagggatagcattaggagatatacttaatgctaaatgaccagttaatgggtgcaggacaccaacatggcacatgtatacatatgtaacaaacctgcacgttgtgcacatgtaccctaaaacttaaagtataataaaaaaaaaaaagaagaaaatacctccttatgctcctgacttattttctttttggttcctcagtcctcttctctctctctctctctctctctctctctctctctctctctctctctcacacacacacacacacataccccacatatacaatatgattaaggatatatgtgaataatgaaagcttcttgtgtatagatttagaagtctaatggacaaaatcaatattttcctatgtgcatttaattcccccctttgatttaggtatatagtctttttttaaaaaagagaaaaaaaattaggtgaccttaaggtatagatcctactttcaaaaggtttacagaactagggagaggaacatggacaagatttaaagaactattttaagcagaataaaatgtgatttatgaacaaagcatatattatttgtgcgtatgtgtgtgtgccaacaaagatgcaattaggagattgcacagggagatgtcattagaaccaaccttaacgggtgagaagtctttgaagacatttagaacatggaagatctctgacagagggaacaaaggcatagtgacaaaagtcaagggcatatttaggactggagagtggtatgtgtggcttgagagtgggcgagaaaaaacaacaatgcctctgtaataggaaagtagacagaggcatgacattaagagctttgccagctgtgctaaaagtagtgaacaagagctaacaaagtgaagaaatgtaccttttctgatgtgtatcattcccttattcatatacttcttgagggggaaattcattctgtgttgatctagtaaactactacaggaccaaatgataaaaagaagtataggaaagaatgtttcagcatactttacgagataacttccttgtagctattctccatagtattttgagcatcacaaagcaatgagctgaaactgtctaagccaaaattgacttgtcatctgttagggatgcttagatgagaattctacatttgagagcttcttagattcattgaccactatgtcccattctaagatccatgaatgcgtgacctaactattacaccttcttttagtctgattgtcaattttgtattttcaattgtgcaagtttctaaaactattttaggaagataaatctagcagtggtgtgggaatagacaagagagaaggggaaagactcttcaggaaactaaactcacaatttatgagtattctttattgcccaagtcttcccaaagtctttcatcaagaaagaggcattgcaactctccttttatagtttgtttttattctggagcagtgatgttttggtggagttgttcctcagtgcgtaattaaagggcctatgacaattacagttcatctcctgctgctcaaggtactgcagatatttggatctactactctcattcatttccaattaatgtcagctttagatttccttcagtatgctatgttataaaatttgattatcgttgtgcccaccttcccacttaatttcaagcaggtttctcgattacctgactaaactaatgaaatctgactaacccaatatctgtggacagtagtgtgatgttactgatttttgtatgattagtcaagtcatattcatgccacgttttcatatagtaccataaaggatattcttctcgtggtccttttcttttattctgaacatacaatgagaagaccggtaaagtgggctaggaaattaaagaaaaatacaaatggcaaaaaatatgggtcactcgaagtctagaatagagagcacaatcaattttgaattaaggggtgataaggtgatttggtcaggtgactggtgaaacaggaaagaaactatactttttgaagtgtttcatccatgtgttaagattcatttggggtcaagaatctaaatttcatatccctgggagtggaaactaagtaaaaaaaaaaattatggaccttggtttaatagctagaggagcaagagtgtatctttatgtgacttaacttctatgtgaaaagtgaaccttaagattaattattgggggaatttacttactcaggttctatgcctagatggtctgcccaactaagaaaacttattttcctgttactccatcctatttttcatacttttatactgcacttgcagaaaagcatatatttctacccaatacgaaaattcctgggaacatatttttctacatttcccaaattacttcaaaaagtaaacttaggttatttcatgatctccattacaatggacaggtggccttattgaatgttgtcctgtgaatacaaagatccagagtttaaagaacaaggtgtacttgcatctcccacttagggtttgcttgtggtggagagagaatctagtttgcttaaaaggatgacagtgcagtgccccaaaatatctgatatcattaaaagtctcatatttgtctttcgtaacttctctagggctgtcgatgacaggagacccttaactcctatgccttgattatgtgaataagcacatgaaaatattttagttatcttagttcacttttaaactaagtttcaattatcactagattctaaatatcatcattgagccgttcttaaggaactgattttctacatattcattcacttcacctatatctagtgtgtctactatttgccaagaaaaatttactctcttaattcagcattccatatacttaacatcataaaaagtaggccatttttagttttctaaattatttatttaaacatttctttaaaattacattctatcattacactatatttcaacactacagtaagcagcctattttgtgatttttccttatataaaatacataattgaaattaaaaatgaagttaccaagagccattttcactctggggaatgcacatttataaattatggggttattttttcttcatcagctttcatattattaaactttgtctcttcataattacagagatgactagacacagaagggaatttaacatttggtgtgcatttgtctaacctatactttatgttagaaaatacatttccatttgaaaaaaaatcagtaattgtgggtgtgatcaagagggcagcctgaaagtcgggtgatgtgactcacacctgtaatcccagcatttttggaggccaaggtgggattatcgattgagcccaggagttcaaaaccagcctgggcaacacagtgagagcctgtctctattagggggaaaaaaaaaaaaagaggaagttagcctgaggcaatgtaaatgaaatacatatttcaaggatatttatacatgattcacgttattcatataaagatgtgccagagaagactataggtacgttattttacactattttgctaggattttaagaaattcaatgtgtttttatttcagttaacttagaaaacttacctaacttatacttctcatggacacaaaagtttttaaagataggatcaaaaagcccacatggtgaagcattttgaactggatgaaaaacatctattatctttaaaattttatgatattactgattgtaatagactccctttttaagaaatcattccttatagaacataaggtttacatttacaatcaacaatttctatccttactacaataaaggcacatataaaaagtacagttgcatatttagcaggtttaattgtacattttaatgtagaaatcaattcaattctttcatttatcagcattattacagtgatttcaaattaagcataggtaactttgatatagataaatgatgtacacagcagttaaattttattttcaattatgtagtaattgtataacctaggcagtataatttgtaaactttgtattttattattatgcttctcccacttggcataagcacaacacttcctaaaagcataattttctatagacttaataactccctaaaaacctgttttggacccctatactatttgatataggcagaaaaaaaacataatccatgctcaaatttgaaaaatgactggtcacatttggtataatactaaaggtaaataaaatcaagagtctatgaacatttccggacctgcacatttgttttattaaaatgcataattgtctttagtgtgtttctatttgtttatactctactgattttaattaaaaataccaaaatacgtttattaaaaaactgtcagaatctaagttgttaaatatacttaactaggaaagtaactgtttaaacgagataatttatagagaaatgtggtgtattgccaattagatgtcaagatacaatacaactgataatgaaaaagtagcattttcttagggatggaatacagtgtaaggaacaccccagtaagaatacaaaaattactgaaaaaaaatcttccttcctgaaaaaccaagtgcccttcaagtgcagaacctcatccaactaattgttaggtatcactaaagcctgataccttcaattttctggatcattcaagctgtatttttgagtccttatactagaggaggtaaagagctataaaaacacttaatggtatctgatgtgaactgtggatcactttgacccatcacttctacgtctacatcttggataaattcccattgttgtcatagattgtacaggtttaatggtgcgtttgtggagggggctcgcttatagaaaatggagactctgaagggataaggaataaatgtatcacttcaggtcttttatttgaaattggggtccagagagcctttttgtatcagacttgtcaaaccatttccatttagtaattatatatgcactagcacttattcctacttacctcacctctttatgcccatttccttgtagttgcggttatgcatgaataatttattgcaccccttaccaacaatggaataaaacttccattctgaaagctttccatactcatttccaatagcaatagggtttttttaacggacgtattacaaatgtacgagtcagttgaacatagtattcctctttgtaagaactccaagtggatgcatgctgttgtctcaaatctcaattagaccttgctttgaggtcccttcattgccagtcatctgttctccttcccctgacttgagtatttctccagatatagataatacattttcccaactctgtgttccaagaactgacagtggctttcattcattttgtttgtttgtttgtttcttctcgttctcaagtatcccgcagtctactgtttcttccctccattcgtttgtcctttcagagtttcaaaatccagcataggtacttcttctaaaatgtcttacccttcacatacacacaccacttgagaccccatcagcctctgtccacacagtttggttacattcatagactatttttatacatcaaaatatttgaaaattttagggtaaatctcagtagtcattcatttttgctcttattcaaccaatactagtcaatcagcctgtgccaggttttgttgcaggtaccaggtatccatccataaagaaaacaacgtccctttgttgtggaatttacattttagcaggggaggcaaagaacccaataaatatgataaaatatcagattaaaagtacgatgaaaaaaatcatcagggtaaaggaaaaagggaagcagtattttagcaagagtggtgaagagaggaggctgagagtgtgacatctgagcagagacctaaatcaagtcaaggaatgaaacatgctactatctaaagaaatgagtcaggataaggaactagtaagagccgaggcccagagatgtgaatatgctgttccaggaacagcaaagagactggttgatatgatgtgaaaaatgagaagaaaccttatgatatgtgtcaagagaaaaaaaaaatttaaaagcatgcttgggaacggaggcctccagatgaaaaaaaaaaacacagttcaaatccttgttcatgcatttagtttgctttgcaatcttgggcaaaatgttaaatttctgtacgttttatcttcctcatttttaaaataggcacaaggacatctacttaataggttcattgtgaggagtaaatgagatgatatatctaggatgcctggcattatatcatacacttaataatacactgaataaataatagttatgtctatttatttccttatcgtttttattattatttcaatgcacagacctgttcataagataatgataaatattagtggcagaaactgaagatgttataaattattaggaggcgggaccactcagttcaatgtatctgttttaatatagtcagcaaaagtgtgaagataccaacaattaaatttcaatgcattcttccatttcactagttttataaactgatgaactaccagaatgtcaatgtatgaattgcatactcattcttaacaaacagatttgcaaaattatgtgtaaaattagccctcagccttccaatttgttattgtcatatttcatggaaatacataatctgtaaatttttgttttaatgatatgtgaaactgcctaaagtagagtcttggcaactacttcacatttgtcctccagagatagtggataaaagtgtcaataaatgaacactctatattcactaatcacaggcaagggacaaggaacagagtggtcacaaaataccacaaaattaaagcacattccaaattaaatatatatgtttttattacagataatgtttgctagactctttctaattatctgcaaagattttaggaatgttttaatgttttaatatttacacacctgtgtatttcaagttcagtcaaacactattgttaaaactaaatcttctcatctctaataataagatgtgaacttatcttggaaggtggttattaggatgggagagataatgtatttcattcaaagtaaaaatatttctctgtttctatctttctctttctctgtcatctatttatcatctatatccaggtatctatgcacctatgtagactagcattcaatgaaccatagatattattagtagtagaattgttactaatattaaaataagaagtatttaagaagaaacatgtcctaaagcataaggtcaattattactctcatgttttttggcatatgaagcctaaaaagtgtcaatttcaagagagtattaataaagattgtgataactgaaaggttcctgcttgaaattttgtgtggtcttacaaatatataaactctaagcatttcagtgagccaattactgactaggcactatgtcttatgactcttttgtcatagtatgtaaaaaacaaagagtagagacatcataaaaattatagtagatgggcactagggaattacgcaaaataatttgtagatttaatgtgaaaccaaaacatctgttcaagtcaatttcccacaggtcatgtggcaaagagtatgagttccagactgaggagaggaaaaggttgttcttccacagggaaataaactgagtgtaataaacataatttttcttcttaagcattatttaaaacaaaaaaaatgccattaaatctatctttcctgcctctcttatcaatgctcccttccctttcaccacttgtttcaaactccaagccttgggattttattttggctttttgccttaatgtaactaaaatgagagcatcacaaatatgaagctcatcaaataatttagcagcattttcccctgtttttaactttctctttggaaacgtagatttcgaaatttaagggcccaaaatatgaaatgcaattataataggccatttgttcattcagcttgataaacttgaataaatagtattgaacttttaatgcaaaaagaacaaaacaaaatagaactctccacgaagaaacttttcaatgtttgcatttctgtgtgaggagaagggtaatgaatgtgggaaccttaatggaatccatgttcttccagtgatgacaagggtcaaaatggagaaaaatggtcactttctacccagtacattatattagttctatgtggacaactataacatagctgatgctggttttcaggccataaatgtaggtatgtattttcctactatttataaggcaaaatttctatttgtttaatgatttctatataggtagattattctgtctttaggattaaaaacgacctgtagaccaagagactttctaatgtccaccttagagtatatggcttttactgttacagtttccatttcctttgcttgcccctttgagagaaggaaaggagacatttgggatacatacatcaatgaggagctattaatgaataaatgaatgaaattgtcagtcaatttatccacatgatcatcaattgccaataattttatcacctctgtgggattaagtagaggtaacagtttagaaatttgattttttgaaagcatttaaaatgttcaaatatatcactctggtaactaagggaaagtgtattattttcttatgcttagtcttattttggttttgcctttttaatttaaattgaacacttatatcaaagagcttgcaggattataatttgaatttttgaagcaaagatcattttcttaacatcaaacaaagagtagatacaataggaataaaatcggcagaaaaacaagagtatcaaggacagacggggagggtgggtctgtgttagcatgtattgctatgaagaaatagccgagactgggtaatgtatttttaaaaagagctttaatcgattcatgattctgcaggttgtacaggaagcaggacaccagcatctactcagcttctggggaggcctccgggagcttttactcatagtggaagatgaaacaggagtaagcatgtcacatggccagagcagaagccagggggaggttgccacacatttaaaaaaaaaaaaaacaaaacagatcgctcaagaactcagctgctatcatgaggacagcatcaagctgtgagggatccacctccgtgactcaaacatctcacaccaggccccaagtccaacacttggcattatatttcaacaagaaaaaaagtttaattggctgatggttctgcaggctgtacaggaagtgtggcacaggcatttgcttggctcctggggaggcctcagggagtttttgctcatggcagaaggtgatgcccacacactttaaaaaaaaaccagatctcatgaaaactcactcactacactgaggacaatacaaaaccatgagggatctgtccccatgacccaaaaacctcccgccaggccccaccaccaacattgggaattatatttccacttgagatttgagtggcggcaaatatccaaactatatcagggctcatgtccagttatatgtcaacatgcctgcattcgaaacatcctgtccaaatcactgccttgtcataatacttatatttttctttattgaatacgaacacaagaagattaaataatagcatttctactttaaaacagtgggcaccatattaacattggaataatagtagtaataacgatagtaataacaatgatataggctgggtgcggaggctcacgcctgtaatcccagcactttgggaggccaaggcgggcggatcatgatgtcaggagatcgagaccatcctggctaacacagtgaaaccccgtctctactaaaaatacaaaaaaattagctgggcatggtggcaggcacctgtagtctcagctacttgggaggctgaggcaggagaatggcgtgaacctgggatgcagagcttgcagtgagccgagatcgtgccactgcactccaacctgggcgacagagcgagacttcatctcaaaaaaaaaattaaataaataaataaataaataataacgataaaaggatatgtgtaggttttttttttaataggctgttaacattaataggcattgtgatttcagggatatcatcaaacatcctggtcctaagacatcccctattgaataggaagggcttaagttaaacttctcatgagccacaattttctgattatatgtttggtgtgtgtaatagccacctcagtgatgatttgattagcctggacccttacataatcattgaagtatacccatgttcctttatatacttctttagtgttgaaagctcaaaattaagcaaaatagtccccttgataatgtttagattcttaacatttgctttctaaagctggcaaatactctcttcccagtgtcatgaagttaaataacatgttgcttagtgaggactttaatgttgccatgccataggaagaccttattcgaaatccccttacctgggagaatgtcagattattaccccccaacttgtttaacacttttaggattttaaaggtgttcacatttgtattagaacaaaatactattgagaaacatttctagaaaaaaattatctttccaaattaaaatcagtggtatgtaatgtaggagtctgattataatgattaaaatacatgggctttgggcatactgcctaggtgaaactcctggtttattgcatcactattagtataacctatgggagttaacctacgtaagcctcagttaatttttctctcaaattgatctaataatcgtctctcataggcttgttttgatagatatttcagtgtatataatatacttaggacagtgcctgatatcagtaagtctccttatatgctatttttctttctattttaattatttatgcaagagaaactattatgctttaactcaattaaaataaaatgcctttgtatttattcatgtcaaaggaaatatgcaagtattgcattcacttcctaggtgcctttttgaattgagctttgcatggttagtttgtataaaaggttcagtgaactttctcataatgattttttattgaacatatggaatccattaagtgttagcaaaagtcactatccactgagctgtgtccaggggctgacagttatgtctatctcttgcaaaaataaacacatacataaatgcactaagacgtatattacctgtcgtcatctcttagagcatttccatttttcttttaagttttttctttcaatgggttttttatctttgtgagtacatggtaggtgtatatgtcaacggggtacatgaggaaggtgtatatattgatggggtacaagagaggttttaacacaagcattcaatatgaaatagtcacatcatggagaatgggttatctatcccttcaagcatttgtgctttgtattacaaacattctaattatactctgttagttattttaaaatgtaccattaagttattactgactatagcaaccctattgtgctatgaaacagtagatcttattcttatttttctaacatcttagaacatttccacaaacactacctgcttgttaaatatacctattctaatcttcatataatcaattacttttttcctctagaatgtactatgacacatccatggggaaaatgtagtaatctaattaagactatttcctctcattttatatttaaaagaatgtgctctatcaatttatttacttgtacagccgtaggcaacctctaaaatatttaaagttcttaaaagtcagatatttcagttaatattgtgattatatagttgattttgatgaacatgttcatctaccagaaataaattatacacacacattgatatggttaggctttctgtccccactcaaatctcattttgaattataatccccgtgtgtcaagggagagaccaggtggaggcaattggatcttgagggtggttttgcccatgctgttctcctgatagtgaatcatgagatcagatggttttataaagggctcttcccccttccctcctcactcattctccttcttgccaccttgtaaaggaggtgccttgctttctactatgccctttctactatgcccttcaccttctactatgattgtaagtttcctgaggtctccccagccatgctgaactatgagtcaattaaatccctttcctttataaattacccagtctcaggcagttctttattgcacatatatgtgtgtgtatgtgtatgtgtgtgtgtgtgtatatgtatgtatatatgtatacatatgtgtgtatatgtatgtatatatgtatgtatatatgtatacatatgtgtgtatatgtatgtatatatgtatacatatgtgtgtgtgtatatatgtgtacatatatatatatatatatatatatatatatatatatatatgaacagagagagagagagagagggaggaagggagagagggagggaagcatggagaaagagagagtaatagcctaaatagaaataaaactagctccaagtacaggttcgtcaacactctcctatcatacccccaccaaagttaatgttaaccacttggagccctgttcttccttagttgtggagtactttagcaaaattttaaatctaattatgcctaattcaacgacagtgctaatttgaaagtgttagaaactgaagacctataataataatgagagttacaaaacataaatagtgagacaatgatgaatgtagtggatgcatgtacgagggctatcatttgacagtagagatgatgctcaaggacagacaatgagtctttcaatgtgtggagaatgtgctgctgttacagtgatgtacaggaaagaaacaaaaactgaggaagtatcagtaaacaaaacactcaaacatatgagtatacagctagaataaaagcaacagtactagatgacaataagcccaatgttaactcagaaagcagaaggtttttaagaatttggggaatactgtggctgatgatacttatgtctcaagccacagatgccatatgggctctgcgcccagttgaatcggcaccacctggcagtaagtgggcaggtccacgactgccaggacatcccttccaacacttgtggagatcaccaggaaggggggagagacctgccttgacagattttcaatgtgggcgaaacaggtctattttgagaaaagatgttcaatagaacatatgtcagcaaggaagaagagatgatgcttagttctaaagctccaaagagctggcttacactccaacttggggaaaatgcatccgggaaatgcaagattaatctcatcttagccattcttttgaatggatggacatgacccctttctacttgaagacagaaaacataaccatattgatttcaggttttcttcattggtttccatttaggattgttcctccccatcttctttctgtgtaggcatcccagttcccaagtgttcatgaagcacgtatggccttcaggggatgtgtctgtatacattgttatcttatggatgcacggttttgtctgcaccttggttctgaatgtctttactcttgagcatctgcccatgggtccccttctcaaggcctcaatttcttgagtttaacactgcatggcccatgcagcttttcagttaagcatctcttgctatgaccaactcttttcctcagtcaactcccacactcttttcagggacaggaaaaatgtagccacttgctggctgcactctgaggcctcaagaaatttagtgaatctgcctttgcccttcttgctgatgaaatactgccacatcaggccccctcttcggaaacctacaagcatctaattttcttgcttcctccccaactttctttttgactcccccccatccagagagttcttatgtctactgtactaggaaaaactcattcttaaggtatggttttcaaatcattctctggtctggactttagctacggttttaaatgaagaaacaacccagagccaaaatataatgaaactatttccttcttccacagagtggaaactgctttggggttaaagggccagtgaaccaaatagaaaaggatctcagggaacacagattgaagagagagaagaaaaaatatgaaggcattgttggttctcttttgagtttaaaatctagtggggattgtaagcacacacacatatacacacacacgcttacacacacacaccagtgaagttatgaaggattttgtcactccaacgaccttgaatttgattatctaggtcagttgttaccaaagtggaatgtacatgcccaataatatgcgtgctaaacagttggggtagtgagaaaaaatactttttatttatcttgttctctagaaattaatattttgattgtatattttatagtgtatgtgatgtgtaagttgtgtctacaaaactagtgtcaatgtaatttaaaattacatatgtctgtgaatatatatttatatagggtacatgcttaaaatgtgtttacttctgaggtacatgaacatttttcccccaggcacagaaagacaaataccacatgatgtcacttaaatgtgcaatgtaagaaaagttgaattcatagagatgtagagtagaatcatggttaacagaggcttgggaggtggagtgagggaatagagagttactgttcaaagattacaaagtttcaactagacagagggaatacattttgagatctatttcaggaacattttgagaccctcactctaagtaataggaaatcattactttagttaacatatttgaatatgagttgtgatgttctatatcgtttatttggattctactaacccacacctagatttttatggcattacctttttactcactgtgaatatcctactcatagacagatgccctgggaacttggacttgaggcacccaagaactgagacagtgagatttgggggcacaaggatctatggataagttcatcttagtgatgataaaatcaatttggcatgtttcacggacagtgtgcattttagaaagggtaaagacttggaaacgggatatttttgagcccaagtgtttccaataaatagctgtataatttgaagcaaataattgattttttgttctctttgtgccctcgcctgtaaaatgggagaaatgtattcctttctcatccttctcatgaggccattgagagtatctaatgagatcagactgtgacatagcataataattctcatttcttgaaggcctattatacactttgcaagcactgtatgtgttgtttctacttctcttgttcgtttttcctggaataaatatccccccctcctttacattggattgccattattcaccctgtaaggaaggcttcatggttctcattttcatctgagaaaacttaggctcagagaagatcagtaacttatctaaaacacacacatacacacacagacatatctatgcccattattcttaacctagtttctctattcaggagttatctctgctgtctctgcttctgattataatctgtgtaagctgatccaagtgacacgattacagggaaattgtaagccctttgagagcagagactacctattgatatctacattttaaaatttgattttagccaacctgtttatatgcaatgactaacaggttagtttgacttgcaataaatattccaaatcctagactaagtaaatttattaatgtaatgatttaacttgattttttcattggcatgtttccctgaagtcgtcatgcaaaattgaaaaaaaaaaaagtatagtgtgtgattctagattgaaattcaggaatcctccagggttaccttgtttgctttccaaatagttcagattgcttagtctgaccaacaaggtccctgacacttggaactctgtctatccctctaattgactttgtccctgatgacctcgcccagagatactcttcaccccagctatactgtgttgctagagtttctctgatatcccatgctattgtttcctttgttctcttcataaggtaccatttcccacccgccaactcctgttttcctgatggacttttgtttcaccttacaagatcattgctaatgtatttattttgagaataaaaagtgtaggaaaggtcacgggacaaagctgtacaccagacctttcccagacgaacctagtgtataatctccctagtccaacatcatggcttaaggcagtcgatagatccgtcttaatgtcccttttgagttttctactattattatatgaggatttatttttgtctgaattcctccctagatttgccctagagagcaatgactatttacagtttattcctctttgtatctcttatgttaaggccagaccttggcacatattctagctgattagaagacgtttgttgaatgaccaagtgattgaacaaatgaccatgtgctctgccacagtccggtcagttctactttggtttggttatgtgtttgccacattaaagttgtagcctgggaagttcagttgtgagatgtctgcagaacatgaaaaattggaataatgaggttatttctaaaattgctataatttaaaataaatagtggtttattccatatatgaatatacactggaaacaaagaatttctagaatactggagattcaatgataacatcattgaaattaaataaataataggattatgctagttactttctaatttactagaaattgaccgtgtgcatggcacgtataatgagtatcatgggatagttacaaaaagtggtgcttagtgagtttctgtggaaaatctcggtaccaataaaacggaggatttccagaaatcgatattcctcaaagcttgacagtatttatgcacggttacactttgtgtgtctttcgtttgaatcaatggaaggaggctataactgaaaattattgttttagtgtattatatctttaataataagagttttaagaatctatcattagaaataattattcctcaatttgtaattctcaacatttgaacaaataaatgctctgtgtctatcagttaatcttgcccatgaagatttaataaagcacgctagtttttacaaatgtgattttagagatggtcattacttggtaaaatattttgtgttaacacttccatgaatatgttctgtgggaatatactgcctccacattgcttgctcatgaagacatgatttttcacatcatcctatcagtattttgagaaagagattgatcccatattctatgagcatttgaacattctctagtatttttgtttaatcattaaaacaacccttgaagtctatgtgctacactggttatttccctcttgactttcctttacagataaccctctatcataaacaacctatctatatttgttgtctccacatcatgttgccagccctgctttaacacactgcacattgacttctagcagcaaaggctcatgggaggtactctcatcaaggacactgatggtcctcatgttgctaaatttggtgggtcctctacagtctttatcctagttcaccttattatggaccactgtcaactctgttctgcttaaaacactctgttccttgcttatatgactctacactcttaactcctttgtgaattcctcatctgcccttccattaagtattgacgacatccttcatagttttgatctaggacctcttttcctcttacttgacattatgtgggtaatcttgtctttgaacgcaattaccattcttatgttgatgacccttaagctataattccagcccaaatcatttttctgaggaagctacaagaatacacaaatgtctaatagatctctatttagatgtccctcaggtgcttcaagcttaaaatactcacctgagctcatcacctcatctataaattctgcttctcctccctggctccctgatttatttaatatgaccaccatccacttagttgaataaagcagaagcctggacaccatctatacctccaattaatcactaagttttgttgttaaatacgttcttacattttctctctagaatgtcttattttccccatctttacacccaaaaccaaaagtcagatgaccctgatctcctgcttagatttcaaaacactatctcttgcctagactctggaatttcagtcttgctcctctccaatctatttctacaccctagactctggaatttcagtcttgctcctctccaatctatttctacacaaaagctagagtaattttttaaaaaacaaaaatctgaatgtgttcattttctgcctaaaagccttcagtaattcttatttgttcttccagggatagagtaacaactttcagacctagtttattagctagttctttaaccacaaaggactctctcacttgtctactccccctaacacacttcgccctaacctttgccattcctccctttcccttttccttcccagatggacttaagtcctttcagattcttaaatgtttcttcctccagtctcttacatctcttttccttgtaactctaaaaactacttagcttacgcaaggaaaaaggtctgtacaattcccggaatcagcgatcctaacgttccctgttgtttttttcgttgggacatgaattcattcacagtggctctaaacatcaccacccctgcctatctctcccattcctactttatctgagcttatccatactcttgaagacttacatattttttttctaccaggaaatcattactagccttattatcccactgtccaaaccaataagtctgattaggtatctgtatatatttaatattactatatgtgtttttctaacactctagtagaggagaaggtgtatttctttctgttttttagaagcctgtatttctgctattatagctcttaaggaactctcatgcaattgcctactagaatgtaagttacggtaggataagaactggatcagtcatatcacacatccacatataggacctagcaccatatctaacacacagcaggtactcaatacatttctttcccaaataactaaagagtttaaacaaaccaaaatgattaaatgagaagtaactgttttggtaattcttgtgtccttactagagtctaaattgagtgatttttatatcatcagtttatactcccctttcccaaccccaattctttcttttttaaattttttaaatcaaatatgccttaaaacttcaggatcagttgagtaaaatgatgcttttgtcgtcttttgcaaaataattgtatttcagaattttgatttagatattataaacacacctaaaataatagctttagtcttaagatgaagtgcttcttaaactccctaagatgggttggactatggatatgaacatggacaatatcacattaatttgtgtacacagttctaacacagggtctggcatataagaacaagtcagtaaatagttgttgaatggaattgaaaatttaagtagcaaataaagtattttgacctacaaagcaagaaatcacatttttctttttgtcacagttccttaggaagataattaattttttagtatttaaggatgttaaatatttattttatgttctatttactaggcttctttttatgaaaattaattggtgaaaatagcgtacatatcttcctttaccagaacatttacattttgggcagtaacgctggcttttgttaaaaaagcaaaatatgtgtgaaatttatgtttgagttgatttcaatgcattacatttccattttaaatcttctttgaaatactctatttttgacaccatgaaactgtattagatcttagtatgttagcaatgttttgcagttttagagccataattattttaatgaccactttcagcatatacgttttctacaggaaaaataatctcaagaacatgaaaagtgaaatctatattttgggtttcaaaatgatacattttagctaaaatatcatagttttaatttctcagtgaaaaatatagtgtggtaatttatgaagagactcagtgtttaaaaattatgactctatagtcaagtttatgtttataggacataggttattcaattacatttaaaataattaatttagaaaatgtgatcaatgtaacaaattttacctgttcttttctaaagctaaatttgttgtttgaagtgtttcttctaaaatgctaatgaactatcaatttaattgttgagcttagagttagaaacttaattatattgccagaaataaagaaacaaatggatcccaaaagattcacacattagaaatgtatgccagggaaatgcttttgaatgtgttcaagtcatggcttctaactcgtaacttataacttgtgttatgtctggcttcattcccttaagaaaaaggaataataatgccttcggagagcatcccagctgtaagagctatgcattggtgtctaaaaaagcttctcactcctcataccatcctggtctgggaatttaaaaaattgtcatcttttgataatctgtatcacatagtcttctgcatagtcatatgaggttagaactgccccataacttttgcagggcctatagtaagtgtgcaaatggttgcctgcatgccacatatttaatatttataaggtataaagtcaacagactattaaatatatcctatctgctttccttgacaattatacaatcataatgatatggacatctagattcgatttagaattctctctctctcattttctttttcttctttctttctttctctttctttctttccttcctttctttctttctttcttctttctttctttctttctttctttctttctttctttctttctttctttctgtctgtctgtctgtcttgtttttttaaatagtgcaagcagtttattccctggcaaggaatttggaaaaaactcaaatagcaaaccacttgatacaataaaataaattccttagagttttgtactggaatgaggcagcttggttagagctaaccctaagcctgttatttaggatacattggcttttcttaagcttaaaaaaaattttactgtgttaatgacatttaacatgagatctatcatcttaataaatactacatgcacaatacattattattgactctaggtagaatgttggacagcagatctctagagctaattcatcctacttaactgaaatgtaatgtctgttgattagtaacttcctatttcgccctatccccagcccctggcaaccaccagtccagtctttgattttatgagtttgactgttttagataccttatttcaagtaagtggaatcatgcagtatttgtctgtgtctgtcttgtttcacttagcgtaatcttaaggtccatccatattgtttcatattgcagaatttccttttataaaggctgaatagtattccattgtgtatatataccacatttatctattcatctgccaatgggcatttaggttgtttctgcatcttagctattgtgaatctgttgccttttttccctacctcctttactccatcctgcactgtgaggaactctgtgcacatagatctggtcgccccatttcccacccacatgttcaagtttttcccactcacctcatgcaaagatttaccccttagccatacccagtaactgactttgaaacatttgcccagggagttgagggattctgaatgccagatcatgggagcggggcttctagtgagcatgttggcttggtcctacagactcctaatcagagctttgcctttgaaagcatggggcccaagggcaaggaccctacttgttaaggtctaaattttttttctgaaataaccacatcgagcttttatgtgtagatggcctaaattgggctaacccagaggcagtgacactcaagtagtttacatctaagcgctttccatgtgcttcttttcccatttctgttacttcttacaaaataaaaaatcagcatctcaattaccctgatttgatcattgagcaatctaaaaagtatcaaaatatcacatgtagcccccatatacatacaactgttatatatcactataaataaatatatacacattatatttaaaaatcaatactttaattttacatgtttaacaaatcactagcatatacattccagattgaacttacgagggatgtggaaaagattcagtgactaaataacaataaagtactctaaaaatgaaaatgtgaaatggagacagtataaatctaaaatcatatcacttatgaagtattgtttcaaataaacaataaaatatatcttcaatcaatttaattttattttagttgtataaaatctttcggtcagcattaacctaattggaacactaaataggtacatctaaaaaatataatcccccccaaaaatatgtagctcataagagataatgcattgaacacagataatattggcgttaaaaacagaactctaccacatttgcaacgaaatgtttatctgttcttcctactagaaaataataaaatagttctgcatgagcttgaactcgaagtattaggtgtacaaagaccttttagtgaatgaatgctagctgaaaagcaaattttaaatatgaaaaattagcaagacaaacatttgaatttgtgggagatgagtaaaactcctataaaaatgaattgtttagtgttaaacagattgtgtatgaaatattaatggcatattgtcctgagctccccttccgctgtttccatgtagatgactgaatttcaaacagaaatatgccaggaatgattacgtgaatgaatattactacatgagattgcttaaagagtatttcttcttttgccttctttttactttcgttatttcatttagtagttagaaaatactgtctacaaatatgtgagaactgcttaatttatttttgagacattaattaattcaactaaactatattgactgtgtgagagagattcccttggtgaatatgtggatttttgcggtggtaagaactctcctctggagcgcaaatggtattgctctaggaataaagcatatacctcaggcccagatgaaccagtgcaatctacagtaacaggttcaaagatgacctcatgacctactgtggactaataaaaatcaaggagacctactgcaaaggtttctgggaaattctttttctcttgcgttgaactaagtaatatacatatgtgatagttagagctgcagcctttgtaataccatgacagaagataacctgaaataaggctgacagacacaagagggagacctaagagtactgagagatatggagcaggaccccctgattgaacttcacttgcagcccccttctgcagttttcaatgacgtgaaccagtagaatccctttgtttactgtttttgattaatttgagtgcagctttatgttatgagcaactaatagcatcctcactgtcacaactgccctctatacggcaggcactttgtgatactaaagaaagcagtatacagagtagagcccagtgaataacagggcagatgttgcaattaaactgcctgtttaaattctagctcttccactagctaacttgtgactatctaagtaatttaaccttcctataatcatacctatcttgaagacttgttgtaagatttaaagcacaacagtgctactataaaacaggtatacagtaaagcttagctacttttttattaggccatatgatatcatttcattaaaatcttatagccatgctataaggtattatgatcctcaatttataaataagacagctcaagttttggtcaagtgactttaccaaggtcatagagctagaaaataatgattccaagttacaagccaaacctcttcaatgccaaatttacatcatcccccattacttgaagtgtaagattcacatggacagaaatttttgactgtttgatcactgctatctccttatcatctaaaacagtctctggtccatattaggtgttcaataaatatttgtagagtacataatttccttcacagactccacaatctggtgaaggaggcagacatgtaagagaattatttcaggattccacagttgatgctgtaacagagctaaatataatgaatggaggaggaatgaataagtttgtctgggagcaatgctatggctattgaaataagtcttgctcatgctttgattgaaatggtggatatagatcacacaacaaataacaattagataacagcttgttgggagaaagcgaggatcagtgtttgccataaacatttctcatagctaatgtcaggtgtttgatttctcaacattttatatctttgactttgattttctctgtttttattttttaactccattctcaagaagtctgcacataagagtttcaacatctagcacttcataactccgtcatctcctctcaggcttagagcaaattctgagacgtggatttatcgtcgagtgatttcttcctggcattttatctctgagaccaggatctggttgctaagcatgtagacatagaaatgcatttcttcattgaaccccataggttcaaactagtggataatgagcacaatgtcaatgtgattatttgtaatgggggaaaggttaccggagaatattacacgaccatccacatagactaacattttcctcatgactaagtttacttagcaaaacaaattaaaaacagaagtttgtttagcagcacagaattgaaggaagacaaccagatggttatgaggaagattcatccaaactatgccagaactgaaagaaattaagttcattcagtacaagaattgtctagaataagagaatccattttgtgtcagcacttcccaagttcttgttaatgctaccttaagttcaattcaaaccaggcagcatttattacgtgttgtgctgggtcctaggaggaccgcgttttaagaacttactgtgatcttctagatcaagtttttatttcaatatttctacctcatttctgattcttaggtgttccttatttcccaatttatcccctgcagaaattgaggcaataagatgtctatcttattgcctatggtgttgattatttatgttatattctgttttgtgaagtttgacctctacctaattaaattacattttcaattgtatcttggattgatttattcaataagtattctttaatatttttgcatgaggtcggtcaggtttcatcagacattaggaattaattataaaaatctctagattggtacttggagcttaaaggaataaggtggtggaacgttaaatgaggaggaaagaaccagcagagctgggataaaattcatctctatcatcttcccacctgcttgatctctggcatataatttactatccgtgaacctcaggtttctcttcagaaaagctgcagggttgttgggggaaataaggcaattcctgggcttcagtatgttcaaaacagagcattaatattattatagacttttgatgatttacacaattttagctttttggcaagacatatttactagtactaagtaaaagcacgttgactttctaaaatgaaaatgtgtatgtgaggatgaagaaaaagaaagtgttttgtttgataatatagcattataacactgcacaaaaaaaaaatggtatatgcagagacttccatcacttgcttatgatgccgcattgggatctcattaataagacacttcctcagacacttcctttgtgttcaataaatttcaatttcctcctttccttcagttcacttcaagaaggacggcagcaactttcttgttgccaaacctgacaaatgttttttagtgctgattatactcgagcattctgtagcaaaatgctgtgggtgaaaatgccttccttcttaagggaatttagcttctgtagtaccagaatctccttgttgaatgaacatgtactgcctaagtcttagtaatccctcctttttgagcccattttctggcatctctccctttaatattcctcaaaaagttggatttttcctggacttttcatattacagactttcctttggtcatcctcatccattccgtgattccaactacattttccctccatcctggcatcttctttcttccagacttgtatatgcaactgcttccattcatacacttgaccaaccttttaatttctataagatcaaaaactcagctcacaagctttcccctaccatcgagcggggttcttcttttgcttctttgtttcagacaatggcaccaccatactcgagtaaggcacgttcatttatcaggtcctaccaaatctacaataaactctcttgaatttatccacttgttttcatttgaacagtcatttctttacctgggtagcctgcaccttctacctgcattgattcagcagtctcttcaccactggctctccctccctctcctgcctctcttcttgctccttcaatttattctctactcttcatagtgacttttattaatgcaaatatgaccttataactcccttgcttaaagacccactcatgtttgtctttgtatccataacttccggcctagggcttaacgcatagcaggtgctcagtaaatctgtggtagatgaaagaacaagttgtataaatactgaatggtctgatgtgctctttgttgtgtcaagaaggacattttgcagtcaggatagctacatcagtcctttagtaggcatttgacagcactcgcattattcctcaagagaagatggatgtattgattctgtatttcaaatgacataacttttgtgaaataagaggctgccacggtaatctgagggatctctcaagttcaagggactccacagtgctttgtgtaaggtaacaggctaaagggttcagtcttaaactttcttaagactgtagttcagggttcctatggtggggctataaccctgaattacatcctctttcatttcatgctgataatgagaactacaaaccaaggggtattaggaaagaatccaggtttgatgcagggaaaaataaaaacaactgataatctctagtgtccccaacttcaagaattcctttcttctttacaccaagctttttttctctgccaggacttactttgtcttctacatgtttaagggagaaaaatgagttaacagaaggggaggtacagcatttctatttacttagatgctagagaacaggatgaaaggtatgaaaaatatgaaagtctctctctctctctctccccagccttcccccgcttctctctctctctctctctctctgtgtgtgtgtgtgtgtgtgcacgtgcgtgtgtgtgtgtgtcataatactcaacctttcttttctttcaagcatatgttgtggcagagacaagtgtacatcaaaattcgtggtccctctttcatagtatagagttcttgctaggatccagctgcaagccagcaactacatttcccagccccactggcatctagttagagccatgtgactagttgtgaccaattgaatgtgagtgggagttatgttgcaggcataccttttccatcttcttacttcccatttgctaaccttatggaaaagagtcccaaagacctaggagatgaaaaagcctaaaatggaaggactcagagtccctgaattactgggtagagaaaagctgtttgcagatgggaatgcccattttgtagtattctttcttttcttaagccactaaaattgtgggatctctttgttatagctactggcattaacctcttacgtatacatacagctatgtgctacaaagaggaatagatacattttttaatcgttgaaaggggagaaagaaacatatttaggaggaaaataatttagtctctacaattgaaaagtgttttatgaataatattttgttttggcagcatattaaatctcaggcagctgaactacattaattttcaattctctatatatgtttttgtcttcagggtttagtaacactgatatataacagtttctttcttttaatttccaaatttaaatgtctaagtttgccttctaggcagaaattaagtcccattgtggaatgagattggatcaacacttcaccaagatcattttagttctttgtaatcttaaatgaaataagctaataaagcattaaattagcatgttgtaaaacttcgtgaagttttaatatgcttctaagtggcagctcttagcttattatctctaaagctaaagtcaaaataaatgtctcagttgatgaaatggagatgaggcaacattttatcaaatttaacaaaatattttatatctgaattataaagtccagattatctagtaattatcatataaatgtatttaaccagacatgcatttttctctaatcagtagccctggagtctttggaccacaaatgtgccttatctcaaatgctttaactgtgacattttgctttagactagctcgactacttctacagaaattatacacttcattcacattcatccagatgaaaaaaatacatgtagaaatgatcataataagtaacatttgtttaggatttcagagtttacgaagggtttttctattcactttctcacttgttcttcatgtaaactggtttggtggacaactgtcattatccctgttacctggagcccctgggtcttagggagacttcttgacttctcaaggtcatgaaggtgctaactctgaccgtgtttttattcctactgtgccacacttctcaggtaaaaatcatattgcagacactttaagagaagtacttaagaaaataaattcctccagagaattacatttaagttgtttcattaactgcagtgcataaagaaaggaaaagtgttcccaaacccatgtagtattttgctattgcttatggtaatattctgcacacctaatattgtcagcataattttccatgtaacaaaatgtcctaaatcagcaatgtccaatataactttgtgtgatgataaaaatgttctgtctctgtgctgtccaatacaacagccactagatacacatgactactgagcaatggtaatatggccagggacactaaggaactaaatttttatttaatattaaataacgtttaaatttcaaaagccgcatgcggctagtggttgtcatcagatactgcagttatagaaaattagaatttacctctttaaatactaaacctatttttaatagtaggatttttaaattaaaatagttctaagtgcttttaagtgatacgaagtcaaatgcaagatttctgttttaatagtactctcaacccagagacaatcttcatgcatccttatacatgttctttgttgccttattctagttttattttaacattaaatgcctctgttctacttgatattgacttgcttcagagaacaccaagtatagtggaaagaaacacacacatgaggacttgaggctaccaaccaggttcaactaaatgcactctgatttaattgtagtattgggatcccctgttgcatttattgaagaagaaaaaaactttgcaaccaaaaagatatttgaaagcaactgttcttcttggacacatgatccctcataaagtggggcttcctgcttttcagagacttaatttctgttcatattcatttcagcaatagtaataatgatgatggcgatgatgataataatcatgatgatgcctaagtgttgtagtaatgcttcttctgagccagacgttagtcaaattactttctctacattaattcaggcaatcatcacaacaatcccacaggacaggttttattattatacttatttagctagcaaatgatataactaggttaagttacttgcccaaggtcatactgccaagacagtggctctagtgtccctgcttctgaccatatgttatgctgcctatcctagagcttttctcttctaaaatagtaaaataatatattctttgtttgtttcatacttttttttttttttttttttttgagagggagtttcgctctttcgcccaggctggagtgaggtggcgcaatctcagctgactgtaacctctgcccccaccaggttcgagtgattcccctgcctcagcctccgaagtacctgggataataggtgcccaccaccatgcctggctaatttttgtgttttcagtagagacagggcttcaccatgttgaccaggctggtctcgagttcctcagctctggcagtccgcccgccttggcctcccacagtgctgggattacatgcatgagccactacacccggcccatacataaatattttaagcgaagtacacatgcatgatcatcatacttttaataatttcatttaactgtttccaaagaatgttagtatgaggttttctttttttctttttataatttcaacttttattttagattcagcgggtacatgttccctggatatagtgcatgatgatgaggtttgctatatgaatgatcccaccacccaggtagcgagcatggtaaccactagttcttcaacccttgcctgttcccttcctccctccttcctctgtagtccccagtgtctattgttcctgtctttatgtccatgtgcactcaatgtttagctcccacttttaagcgagaacatgcagtactcgttgtctgttcctgcgttaacgtgcttaggatagtggcctccaattgcatccatgttgttgcacaggccatgattttgttagtttttatggctgtgtagtattccatggtgtatacgcgccacattctttatcctgtccaccattaatgggcacctaggttgattgcatgtctttgccattgtgaatagtgctgtgatgttatatgtactttttggtatattcaaagagaaatgctattttcctcttgacatatttatgtcaatttaacatatttatgtcccttttctttttaggagcaccattctcttcctttaacattataaataaaatattttttgcttttctgtttttgtaagtgcagttttattgacagagtgagacatacacgtcgatattgtgactagctgcatgtcttctattatttagaggtctcactcaaatgtagattatcaaattctgttagtgaagagggtagaacagcagaactaatgctggtttccttctctagcattatttgatgataaactaagatgataataccccccaggtcttagatacctgcagtaggacaggcaccctacatttaatgctcctaggaatccttcaaagtgatagcatagttattatacagtaattgagaaaactgatgttcataagttagaaatttttccgaagttgcaaagaaagtgaatggaagaattataccaagttctggccgggcgcagtagctcatgcctgtaatctcagcgcttcaggaggccgaggcgggcggatcatgaggtcaagagattgagaccatcctggccaacatggtgagaccccgtctttactaaaaatagtaaaattagctgggcgtggtggcacgcacctgtaatctcagctactcgggaggctgaggtaggagaatcacttgaacccgggaggcggagtttgcagtgagccgagatcgtgccattgcactccagcctgggcgacaagagcaaaactccgtctcagaagaaaaaaaaaaaaaaaaaaagaggattataccgagttctctttgattccaagcccaaacaaatccttttttgcaatatatgacattgtttccctgtttgcattccccattctgtgtatcacacatcctgtggcctgatcaaaattcattttcagattctgaatttattttccattgaatctatataaactataaagacagaagatatatgtatgtgtgtatacccacgtttctcttccagtgtcaactgataaaaatagatttcaaagtctcaataacctttaattccctttttctcttaaaaattctttagaacttgtacatgacattctgactctagcagattttagaaaacagagaggccattagatattcataccttactattcagatgaagtattcaatgctaaattatgtaatttatctgctttgcaaattgtatggtcagattgagttccacaaaggagagataatttttaatataggcattctgtagcttccctaattattgaattagtttagagcaaaatccttaaattgtatcgttgctatgctcaaattttgtatacttgtccacgtaggctatattaagatttcattgaattttggtttctttctcagtgataattcaatatatcaactcaccactcagatttgcctttgggaaaatccaggccccttttctggatttttagagcagattttaaaaaagtgattctgtatatgtgttgaaattaaccacatctcattgcttttgaatgattgaggtaatgtatacctactactttaaaaaaaatgacttacttagaaggtgtccatagttttataagttccattgaactggtttatattgtatttagaaaggaaaactactccttttatccttaagggtgaaaacctggattttattatacaattaacacatatttattttttattatgaaatatatcacaatataaacgtttacagggagtgtttaaagtggtgttgtccaatggaaatataatgtgagtcaaatacgtagttttcaattttctactagccatattagaaaaagaaacagagaaattaatgtaataggatactttatttagcctagtatatccaaatcacaattatttaaatatgtaatcaatataaaaattactaattatgtatttaacctttttctttagtaagtctctgaaatctagtgtatattttacatttatggcacattgcaatttgcattagtcacatttgaattgttcaatagccacaggtggctaatggctaccgtgttggacagcacaggtttaaagaataatatgaacatctgtgttccaacattctgagtttcaaataagaagaacaccatcagtattttgggagaagctccctatgttaccccttgctaatcaccttccttccccccagagccaaaagtaaccattatcttgaatttctagtaaacaatgctcattttttaaaaaacgtatgttcaacacctgtatttgtatctttaaagagtagctagttttagtttgcctggatttgaactttatattaagggaaccaccccatctctaatcttctctgtgaattcttttctctcaatactatgttttacatatttacgttcatcaatgtgcaactcattgtatgtatataacacaatgtatatattttacatgcgtatggacatttgggttgtttttatgtttttgttcatcacaaaccacaacacacatgtgttcttgtatatgttttatagtgcatgtttaaaaatttctcaacagtattcgctagtagtattgtcaggtcatagggtatgcacacataaatagaaatgattgattagctgcaatttgtagtgcacacatatttgctatgtaagtgatccatgtttaagactttaactgaatttaaaaaatattttattggagccaatctaaatgagctaagggtttgtattgtttacataagcaaagattacacttactgggtcaattcggttgattaactttggatatataaaatatatagctagttgttaaatagatataattattaattggcattacttttgtttgtatataaaaatttcaaaatatccatgacttaagcaaggtaaacacccactgggtggcttaagcaacagaaatgtatttcttgcagttccggaagttgaacgtctaagattaaggtgatgacagggttggtttctggtgagtcctcccccattggcttgcagatagccgccttctccttcatgacctttcctctgtgtatgtgcatcccttgtagctgttcttccttttatgaggacattagacttattggattaaggtcctacccatatgaactcatttaaccttaattacccctttaaaggccctacctccacttgcaggggttaaaacttcaacatatgaatggggttgaggagacctacttcagtccataacagtttctatattctgaagatggtctttaattaactaaacagttaatgttactttactgggaatgtcttttggatgggggaataagctgatgatatgagaagggttggtgaatttctcataagtgtgaaatttgttgggccggcccagcatgattttcaatcaaatacgctttggggacaagtaggttgaatcactacgagaggtttaaaagaaagcaagttgtaattgcaacttttaattgaaagaaagacaggctttgttgatgtgccagcaagactgataactggctttaacgtagatagtaaggcagcagattcaatccactgatcgtgatctactagtgaatttcaaagccttatgcaatagaactacaaaccctttccttgcccaccttgcaggtggatccataggcaaaatgaacatttgcaaaaaagccgctatgtttcagaatttgtgctagggctttaatatctataatttctccaaatcctcacaatttaagaattaattcaacttagccccatgaatagggtgaaaattctgagatttaacaaactaaaataagttatctgaagacagacaaatagaaagagttgagatattctatttgaatgtaaaattttcaaaaagtagaatgacagcgtcaggaattacagtctcagtgttgaacacaagacttaggaacaaatttgctgcatgtaatttcattgagatgggacaaagtacagcatacgtaaggaagttttagaacaaataagataattattttacgagctttgaaacatgtgtaagaaagatacgaataaaagtataatcacatttgactaaaacatgaataccttaaaactgaaaagcactgagattatcattatataattttgaatattttaaaccacaatgctttgggagtgcactgtaatattttagaattggaattttaacttactggcttaaaaagtaatgtactttgttttaaattcaaagattatcttgtaaattcagttcgatctattgaaaaaattataaaattcggcaagaagccaaagaagaacaattatgtagctcaagataattaaattttcatgtttggctttagaaatatattcgtcgtgacatagtacatggtaatctagtgagcccagacaagtagttttctctttttgtcaaagggaacaatttgatgcgtgttcaagttgcttaaataaaattttgtatgtgctttctcatcacaagagaacaatatgatttttgaaattatttttactttataaaagaaaaaaaaaagccctcacagagaaaaaagaaaaaaatgatgatgtctttgaaaaacaaagttaatacagctttacatatatttgacctacatcagggttaatatttttcaaggtgaaacattagatgctggaacttgcaaaaacaggcaatcctcctttagatgaaacggacactctaagggttaattcattcactgagacctattgtgaagtaagccctacagagactgaaaaagttaaatgcaactcacaaaagttgctagaagagtcatgatgttaaaataaaataagtacacaatgtatgctgcaagtatacttagagccatgctaggtgcggttgagaagttcaatacaggtccaagataatagctgcttctcctatagaacatgtcttctcattggagggataagacctgtgtctatgaaacaggcgtaattacatagctctggaactatatatgccgaaataaatgagacagtaagtgttattgtactataaagaatgaagaaatcatgatgagaagtaacagttaatgaatgttttctagaaagagtaggatctgaattggccttaggttgtaagcagagtttatagatagagtagtggtatgtcagagtcactctgggtgcttaaacatacaaatccccaagtctcacccaaatgtgtcttcagatgaaaggaaaaaacaaatgacttgagctcccccgcaaagaacacgggtggtatattgagcagccaaggagtgaccagagtggcaggcccatgttgagggacaaaagaggacaattagaatatgattaatacaaatttacagtgggatgagttgttagcctgaggagcttgaatgtgaacctctgtgcaaaaaggagtcattaaatacttttgaaaaaggtgggatgggaagaaaatgacattctcaagacaattagatcgaacagtattaagcatgctgacttattaagttatgcaccttgagagggtggaatgagggaaaagggtctttatctggagtaagacaggaagaagctaagctgtaattcttactggactgtaaattatgtgcagatatattatctgtcatgttcgtgggcgcattctcagtacatagcacttgaaacaggtactcgataaattgtcaaatggatgcatggagtgatttccatgcaaaatctaatattgtatagtattagaagggggaaaaaagcatggcattatgctagcagaaatgtcatttggtattgaggatgaaacattttcaacagtttgcaaagccatccactcaaacattctgtcactttccaataattttgaaggatgttctttctacttctaccttattacacaatgagttgagtaagataaagaagtcatgtgcaacaaaacagagggagattttctgaaaggcactacaccaggaagttgttgtactcttgcttcatcttgccatcttggatatacttctggcgctacctccaggccagttcctcgttacatatgtcatttacttcccacatgctagactcaccgagttaatcattttgctgcagttaacacattttagcagagtgtaggtttatgggtgagaaggaaatcaatgatgtttcaatacagggttcttttcccatcccccttatttccacttagaactgtctctcaagtcttaatttgcctctaaacttttttcccagcttacattcttttctgaaaaatgcaacgacgatgccaatgtttgttgacctgaaatacattgtaaaacattcataatactttgagcagagcttccaaactcccatttgcctcttttatctcccttaccttggcccctttttgaaggcaatgtgatatttaatccgtttctattgatgcttcaaaattattgaaaaactggtaattgtatttttccctttacttatcagttgctagttgacaatgagtgtttgcccaaacaataaccaatcaaaaggtaaaaaggagattccagacatatctgagaagaaattctttggaagaagcccgtaaatggaatgggaattcaaacaaagccgtttccaaaagaaatactaaatggtctctaaatgcaaaaggattgctccccaagcattttatgggagcataaaaagctcccaacacattttatgacaatacttctactcaatgacttcttgtgttgacatatttgttgcactcgacgttagtatttacagcttcttatcccaaatatttacttaactgaagccctgatgtttttaaaaacttttcatctgtgtttaacagcccattttacagaaacttatttgtttcatcaggcagatatttactgagaacttgcaagtgccatatattctaaaaatgctgatgataaaactgtgaacacaatagattctcatggtgcttatggtcagggctagcacacacacttgtgaaatgatcactgatgatcaaaggcataaacactacatttggaagaaataccgagggatccagaagtatcttggaaacactagcaagtatagcagatggtgggattggtgcttcaaagaacttcttgtggaagatgttacgtatgtaccttctctgtgccaggcactgctaggaagtgctggagagaaaaagatgtgctagataccgcctctgtcctatgtgcttgtgctttgtggggaggtgagtaggataatcccagttctcatgcagtgtaatgagtaccatgacggaaatgcactccaagaactaggcagcatgaccagagataggacatttgagaaagacttcactcgggtggtactatcttagtctgggtgctaaaatagatgtgatagatgagtaagggtgacccggaagcaggagggaaagggaggggctttcagaacaacaagtgcgaggacattaaggtgaaatagagtataatagtattcccagatccttgggattgttctccattaggctaaaacaaaggtgttttctcttctttaagatttcatgactgcagattgcataacagaaggtcatttaatagacctctaaactgaaggaattcttgaattaaatcacaacatatcttccatggccagagaaaccattgcctccttatgtcgacattactaacagcaccagcacctgctgctcaggccagcgggagggttgggtgttgctgcctaggtaatgctcaccaactgatgtcctgccatgagtagttttgccaagttccacaaaaaaaacttagtgttctatcagcatctaatgagaattacagtcattagttaaataaaagaactattagataaggagcagaatgaacaacacacaatccatcagcttggtgaatggtatcagatggtttctgggtgctgggcagctgtgcatccaagtagacagggagaatatatatgtcctttgccttatgtacttgtttctctaatccaaaggcacagcaatccgtggaagctgctatgataaggtgtttagtggtgaaaatgtcttgaaagccagtagattattaaagtgatgtttttaaaaatgcagatggagagtaagtactttttatctagagtagtagttctcaaagggaggtcccgggatcagcagcgttagcatcacttgggaacttagacctgcatgggccccattccagatctcacttgaaaactctagggggtgtagcccggcagtctttgttgtgaccagctctccagggggttctgacactccaaatgttcaagtttcagaacgctactcacaggccatcatgctcggcatcacctgaaagcttgttagaactagaaagtcttggccccaccccaagcctactaaatcagagtttttgggagtagggccaagaaaactgtgggttaacaaggtctccaagtgattcttattcatgtcaaaatttgaaaagcgtcgatcgaactgttggttctcagctttgattgcgtatctgaatcacctggggagacagttgagctattccgggcccagatcacatctagaccaattgaatcagaatctatggaggcaggacccagacatcagtattttaaaatatttcttgaatgatcccagagtgtagctaaggttgagaaacactgttctaggattaaaggattaatgtgtttgagagtatgttaagatcttaggcaaatcacaagggtgttaagaactaccatcttcgcaaaaggagaatgtgcctcagatattctggtactgctttgattttaccttcagtagtcttacctattttgagtatgcttagtagtactaatatgaggcttattactaatatgttaaaatttgtcttttaattaagtgggtctaaacgttttaatctttaatctctgacccaactagaacttttctaaacattttcataatagtctccaccttgtcttctgaccttcacttatgttctttcagggttcttcgtgtgttactagtaatagtaatggcaagtgtttattgaacacttactatgtgaagattctaactggcttttaataatcacatcagctctgggaggtagaaggtagggatcctccttgcttatcaggtgagaaaactgtactatagagaagttagcaacttttcccaggtcataatatgtgacagctaaagggagcataatggttggaataaaataaatctactctagttgtaccgaaggctcatatttgtctcacgtacttgatttggtcgaggcccaaggggtcaatttccaatgcttggattcctggatatgtagagttgtattaaaaatgctaaaaacctattatgtatcatacaatcatacatatcacctaaagtattatggaaatgaatctgtattattaagggaaaaaggcctgtgtgaagaacaactgaaacttcattttaattgaaattaaataacatgcatcatacactaaaagtgcacgttatgaccccatgaattacttcaggtggctttgattcatgttacatacactaacaaatatagaagagtgatataatgcttcttaattaactactaatggaagtttactatttaactgcttcttatgtaagaatgtaaatgttttctgaaatatcagaacttttcattaggaagcacttttaaaaatagcaaaactgatatgcactatgatttccatatacattaaattgaacttgtaaatgatgttataaattatagaaaccaaggggatgttcaaattagatatttgtctaaataaatcatgtatggattgaacaaatactcattgagaaataaatgtattccttttctttcaattatctaggattccttgtttatctcttcagaagcaaaatgtcttctgtccgttttatttccagttaaacattcttcagattatgtaaataagttaacttccaatcctcttatttctgtttatctcaccactcttctaatttagacgtgatcaatatcttatctttttgcatttcatagacatcaggatccagaataattgagtgagctcaaaacaacaatggcaagaatgatgttttcagaaaactcagcaatcattcgtttaataaatattcattgcctaccaactataagcaaagtattggctaggccatgtggggtatacaaaaatgtattaaatatggctcattctccctaagaacttacacctattagacaaagtacatgcataaaaattataatgtataatagaaaataaatacaagccctagaatgcacagttgaagtacgatttgcatttattataaaaagaaagatgaattggctgggcacggtggctcacgcctgtaatcccagcactttgggaggccaaggtgggcagatcacgaggtcaggagttcgagaccatcctggccaacatggtgaaactctatctctactaaatatacaaaaattagccgggtttggtggtatgcacctgtaatcccagctacttagcaggctgaggcaggagaattgtttgaacctgggaggtggaggttgcagtgagccaagatctggccattgcactccagcctgggcaacagcaagattccatctcaaaaaaaaaaaaaggaaagaaaagaaaagattaatttcctgttagctaaatcaaggaaggcttcatggagaaaaaaatatttcaacacacacttgacgtagcagtgggatcaggctgatgttagggaagaatgaatgacattctacactgagaaagagatattcagtatatatatgaagagcagtagagaaactaacaagtggaaatagactcaatttacaatacttgcctgcctggagtactctatacgttgactgtaagttgcagtttactcagaacaatcccactttctacttgtttatcctatgtaatcatttattgggcctccttttgctctcaaaaatatccttgtttggataatagattatcactctgttcctaaatgaactgccctgtgtcctatcccagtaaaagggtgcattcgggcccttcgtaactgcctccactacatggttgattgaaaccagagcttggcattaagaagttagctgaacaatcagatttctattcttggaaaacccaagaatttcagaatagatacagaagctgtatagctttaataacatgacagagttgtagccttgaaagctatgtacaattcagaattatgagggagaagaaattgaagaaacagtagcagccgggtaaatgcagaaacaaatgagggagacacctagggggtgactgaggcacaataatggaagagaagtgcagtgaaattgcttgaactcttactgatgagatttctactgttgccttgaatccaggaccacctatatgttcattctttgtcatgctcagagttatgacagatgctgttattgaattccccagagactcccttatcgtctcacctcaaaccttacaataatcccttctatctttctatccatccaagctggcttaagtaaagtctatgatccatattcctagtaaacagagaagggaaagagactgaaggcaaaggccccaattagtaggctattgcaatatttcagggaaaaggcaatggccatcacattgttgtcccaggaatgagaatagaaatgaaagaagataatgaaagttgaaaggactgggggggcttgacaactgtttagacttgaggagtcagataaaataggaagccaaagataattcagaatattttgattttgattttcatcaccaaataagatagtagtactatgaagaaaaaatggttaaaaaacaataataataaagagaactcctccaaatagtaccaagggagggagtttaatagaggaaattaattccgtaggtgatgagagtcctgagaagccaaacgagaaaagatcaaaacaacccagggattggcagtcgcaggaagctgttctcacttatggctggggctttaagcacaaggtgacatgagatttcagaatttgaagtcgtctggaggcagctaggatcaggtggggcctgtcctgttcggcaggacctgcaaccacaggaggaggatgcgtcaagcagaaagttggaacacaagaggggattcagccataagccacaaaataccttccagagcagagagaaggagaaataccctgaattccgtattttccctgccatttagttccctgctattgccacacattgacgtattccatccagagaagtccattggcatatgagtctgggaaatgtagttcccagggggacatgatcttaagggaaatagacaatgactggtgcaacaactgacctgtgtgaggcaggagggaaaaaacaggaataatatagtttttctctagatcccttcatgcacaaagatgcaaaagaaatgtgttggcttaatgagccattctgggtggccctgtaggtggctgtcctacgaataagatttttagacaaaacagagatgacttcaaatgtcacaagaaaagtatcagacaggaattaatattgacttgatctgtcacaggcgtcaatgatttgcattaagccaacgatcttcattgttaatgtctgggaaattgccagcagcattacgactacttgtgtggattagtgtaacggattcccccactaacattcaggaaatcatgtcaagcacagagtgcctatgtaagagtggttgtgtctattcactacatttcttggactaataacacacttagccttcctgaattgccaacatgtacaaaaccagattggggttttttagttgttcatggaactatcatttattgggtagctcctgtagaagcaagatacagaaactctaattaggaataagacagtccctgtacttcaaagagctctcaggggaggcacacaagtaaacaagcaattattatcatacgttaggataataccgtcatggtgataaccactgagtgatagccaaacacatggaagaggtacccaagtctaacttggggtagtcagagactgctttcaaggatatccgagtaagtgttagctaagacatgatacgtatttctaggagggaaattttcaaggcaaggtggagattgtgcagtgacgcccagagcctggattattttggtgactgctagtatttcagaatgacttcagcaaaagttgtagagaagatagaagacaacaaagtataagcagaggccagataatgaggacctggaacagtggtttgctggtaaatgtttaacaagaggctcttggcggggagagagagtgtctgatttgcagcatttggcaaattttgttgcacaaatgctccagcatagccaatttcaagctaccagtgtgacgtcattgaatgcagaattggaaagaaacgggcagtagcacagcattgtatagttattttcattacccagatataatagataaaatatccagatggtatttaatagatatggatgcaaaatttaaatatatgtacattcatgtgcttcatgttactgaatgcgcacaacattcattatccattcattcacgtgttaatttaacaaacatttctgagcctctgctctgtgccaaacgcagttctagctgctggaattacagcactgaaaaaaaaaatttgtcctcactgaggtaagacaaacattattatgcccattttacagctgagaaattaagacatatgaggattaagcagtatagttaaaatcacacaattggtacatgaaggaatcaaagaggaaatcagctctcagattttaaatccagggactcgtttctgctataccatactacctacctagttgagctggattttatcatggtttccctatttttatcaccatgtggttggataagtaaaataaatatatgtgacctttcaaataaatttgggtcatttttcttggaagctcatctggtgtgaactttaaaatactgcaattaataatgattataataccctggaactctgtagcaacctcttttgaagaactccaaggagcctctaaatgtatcaaactaagttcttcaagtgaattagttatcatctgagagtaatatagacttttaaaaatgcattaattgtattaaccctttcaggcccatagacttaagtgtttctttctccaaataaaaatagtaatctctgtccattttctttagagaataatgaagtaattttcattgaatatgtagtcaacataattacttcaattcaatcgtgaaggattttaaaaattatttatgtctactaacttaaagacatgcatagatttcaagaacttaaaaatgcatattgcctctttgccctatgcctcataaaacaaaattatgataacgttgtgtgttacagaaaaacgcactgattgtaatgaagggtgcttcaaaggccatgaacttggaaagcaacttatttacagagacccccagcaatagcagctaaaagattgactgactccctttattttcagttatccttcagacacttttgacctcttcctgtgcctttctagtcatgtgcaatcttgtggatatctcttccttcctcttgttattttctatttcctctgtttctatttgtttctaaaaataatcatgtttgaatataggattagcttccttcccatctccccattaccaatctctcactataccgctatgttattaatcttcctgagaaatatatcaggttcattacattagttaccagctcaaaacgtatcagtggctttctagtcctcacaggctcaagttaatctgcatattctgactttcatattctgggttcatgcaaacttttcaactttccctcttatacctacttaggaggaccctcaggttccatcatgctcatgtttcaagccagaagttctcctgcctcttcctctatgtagactccacatagactatgatatcctgcttctcttttaatcctccatcttcagctcacagccacactcctctgtgaacagttaaatgattctcccacctcttacctcctatagcacttatttttcatgcagcatttttgagacttaattaaatctacagttttaaaaaatgtttttctaccacagtctcttattcatactaaaactttcaagtctatccattttgcttatacaaccacaccgttaggtcttttaggtccaagaatacaagagaatggcaaagcacgttgtttacatccacacatactgtgtaaattcaggtaattttttttaatcctatgatcctcaattacctcacctgtaaaataggtactactcatactgcagaactcttgttggaattaaataaatgagtgtattaaaaatgctcaacaagatttggcacaaaatcggtactcagtaaatgctaatcattattccctttctcttcaaagctccacaattctgtattcatatcaccctctttatatcatttgcaaaaatgtatcctattccaactctttccacctagcctcaacatttacaaacactcctggtgggaagggaaagcttttgaggagagcacatctatactcatttacttctcagggatgcaagctgccctgcttactgagggcatatgttcatagtcacaccggagcccactgtccccttatactctcaaatgggcagtagcaaatcatcttgatcggtagtaatgacctgtctctaaattttcacatgcatcagataatttcttttttagtaagtgttatcttacatatatgccaaaatatcaccattatatggaacactagctgaaagaaaaattattcagtagtcttaattttctagctaacataaattctctccattttcatcatccatttagattaaagactttactgttagctgaatattcagagactttattctgatttttaaaatttatgaggttcataatgttaagacttcaagggtgagctgtttgtgtcatttataatgcgtgactagacagtaactagaaaatggattgttgactttacaagatttctccccaccacgtccccccaaacctgtgctgctgtgtatttggcctgaaatctttacttctagtcaatctttggacctaaagcctaccagcttttagcatcctttaagattgacgtgtctctgggagaccaatagatgctaaaccaaatttcgtatgcacttggcaatataggataataacaaccatactccctgcaattgtttcctaacacagatgtaacaaattaccacaagctgggtggcttaatagacatttattctctcacaaatctggaagctaggtgtccaaaatcaaggtcaattatccctctgaaggctctggggaagaattcttccttgcctcttccagcttctggtagccccaggtgttccttgatttcaagcagcacaagttcaacatctgctcctgacctcacataaccctcttctttgtgtgtctttctgtgtccactcttttctttattattattattattattattattattattattatactttaagttttagggtacatgtgcacaatgtgcaggttagttacatatgtatgcatgtgccatgctggtgtgctgcacccattagctcatcatttagcattaggtatatctcctaatgctatccctccccccctccccccaccccacaacagtccccagagtgtgatgttcccattcctgtgtccatgtgttctcattgttcaattcccacctgtgagtgagagtatgcagtgtttggttttttgttcttgcgatagtttactgagaatgatgatttccaatttcatccatgtctctacaaagaacatgaactcatcatttttttatggctgcatagtattccatggtgtatatgtgccacattttcttaatccagtctatcattgttggacatttgggttggttccaagtctttgctattgtgaatagtgccgcaaaaggacaccagtctttggatttagagcccaccctaaattcatggtgatgtcattttgaaattcttaactaattacatcttcaaagaccctatttccaaatctggtgacattcaaggtttcagggacatgtgactattcaggggaaactattcatcccaccacatcccccttgaaaattctggaaaatgtagtaataaaggcttctgataaattagtgtggaaagtattcacggttataaattactaaaaagtctcactgtgagctcttaatcaaaaggccctataaaacatttatttgcttgattaaaactacacatccgatattttggttttggatttattattatttttagacttggaataactattttatgtgaaatagattccataactgaagcagcatacctctcaatttcccaacatttattttattattttttgtcttcacactacttaataactgaggaaaaatcatttagaccaaagttcaccttggttgacaccatccagacagctacaggaaataacaatggaaactaaatctctaagaaaaagagtctttcatgtgaaatattgcagagttgattctagatatatagctgttggaagaatggatactattacatagatatggcagagtggtatccagcacctttcaacaaagatctttcagagtcagtcttattatgtctggagaatttacccagggcttaggtgcttttactgacaatctaaccacctgcaccccacccaccgtctaaagctaaagtttattggaagacttaggaaatcagtcttcggaatgtttctgagactggtacacccaccacttcattaaagtgcttcacttcacttcattagacaagaagtaaaatacttgtcaggaaattatttatagtaccatgtatatgggtatcttatttaatactacttaatgatggtactacaagttatataaaatggagaaataagtcatcaagtttgacaataatgatatttgatattatcattatcttttttattcgttcccacagaagtactctgttattggtttagaaaaatgatatttgatataataaagaaggaaaaggtggtaatattctttattttttgtatctttataccccagctctttcaccaatctcccccatctctgtagttctcctctggtgtccccaggcagtgaactattcccagtggttagggaacatctcattgagtaagttacatcaacatttcttcacatttcaggacaacaggaacagtgccaaatcctagcccattgttcaactctcaagccttattatcctaataacacatccatcccaagaaagaattcatcaagatcagagaggaatacgtataattttttatagtacagtatttaaaatgaaacagcttttggcccgcgtggtctcagtgggctcaagggggaaattcaggatgctagctcatctcacaccaagtttaataaagggtgtcctataaaaagctaatttcttgctggtaaattgctttttaagtaatccttgctgttgcaagagacccattcatagcgctgacactgggagccatgttggaaaggctagatatgctctgggagataaggtaagatccaggtggaatcttctctttacagaatgacaatgtatatagctaatattgtcctttgaggctagtttgcatgcagttgctggtatggcactgctcagcagcctgctgcagataagaatgagtgatgatgccctagattttaatggaacttttagagtgcatgcagcagtggggtgcagtcttcagcaaagaaaaacgagctgacttgcaggcatgagagatcatcaagaaagataaagaaataggacatccactctaggttaggcaaggctttttagaggatattatggaaatgagcaagaaccaatttaatttttataatgccactccatttaactttaaaatacaaggtcaaggtactgtgtttttcataatgattaaagatttggagcactctttctgttgaaacatactgcatctgtttggcagaaaaaaaaagtgacaaagaataaaactgggatcagagaacaacaaaaacatattctgtcacttgcctaacacaagttaaaaagcaaaggaaaaagagacaactctgatggacatgttcatccttatcccaacagaaggatttatttacctaaggtcctattatttcaagttactttgatcccaggatggtaacataaaatgtacattttaaaataaaatggaagtataagatcaataaaaaccacatatctgtggataaaacagcagattcaatcttgtggctgaaagtttgctttaacccaacatttggtaaactattcactctgtaatttattaaaagacatactgttattataaaactatctcagtttgcatcttgttggttctgtcaaaatttcatcctgctaattctcaacttgtaatatctctgatatacatgattaatctattttaggaataaaacaaaaactacctttatcttacgcatttctaggaagtgtttttagatgtaaagtaggggtaattgtagtatagtggaaaggattttgaacttgaagccagaacatatgtctctgccaaaaactaggtgtgtgaccttaaataagttacttagcttcctgaatcttagtttgtttagcttttttctataaagtggcacacctatccacatcacagttttgttgtcaaaattaaataaaatactatattagaaagaaacttttagaaagaaatttataaactgaaatgtactatacaagtttaaatcattctcattattttcttaccctaaaattttgaccttatttttcttagcaaatggctgaatctgtaaaatttaacccccacgcagcatctggattcaagagaactacggtcatttctttatacagaatactaattatacacatatagcaaaacacaagttttttccaactactctgtgtttttaaagattcagtgtgggcagaaggaattttatcaactatgttaggggaaaaaagtctgaagaaatgaaaataatgagaaaaagcactgttgatttaagtgcaggaacataaaacttcaaggcaaatgtgaggccaactgagttcatatatatcctcacaaaatgatttagttaatttaaaaacttttctaataagcaacacaggtaatcccaaattctatcttttatagctctaagagtccccataatttattcagcaattatttaccacccacttattataagaaaagccctgggataagtcttgagaagaaactaacaaaaacaaaacttgattgtttgctctcaaaaagctgggtctaaaataggcaaggtaagattttgttttgaggagcccgtattttccagcactgtccattgtaacattaaaatagtttgccaaaatcctcactctgtgggtgtatttgcctagggtgctaaaattgcttaaaaactttgttatttggctaactaaaatcactgaatagtaaacagtagcattagagatggcagagacattaggtgtcatgcagttcaactgcttcacctagcagacaaagacattaagttccatttcttaaatttaactatctggttgaggatacacagtagcagagctaaatcaagaacctcttggggttagagtttttgtttatgcattactttgttttggaattaaaaacagtgcctgtttgctaagttaaattgaaaatatgctctgaaggagaaaaacagctataaaaatagacttaacttccaaactatggatcacaataaactaaagaaataatttctgtagcaataaactccaacactttccataggaccagaaaggcttgagaaagaggagaacaaaaaaatgctttggggcttaccatatatatggagaaagctaaatgaataaaccagttgaaagacagcgagttatactagtaacaatattactgatatcggagctctcacttataaattgtatattatgatcatagtgactaggtactttatatctgctttctcattccttcctcacattaattcacatgtaggacagattacctcttctgtttctatccagaggcctagagctcaggccctcatcgaagacagacagagctatcatccttattctaaaaaaaaactaagaccccagacatagctgtgctacttatagactagaatgtgagagaaaaagacaagctttcatcatgggcttaacaaactgaaacacttcttcaattttgagattgagaaacttagctaatgctaggtgtaaagatgatatgctaccttcataaccttggtgaggagaaattagcatttctctcagtcctagaaggaggatgaccatgaaggtcttcattctcttgagaagataatcaaatgcttcactgccctgttaacggtttactcaatattcaccaagaaaagtagatgggattatttttgcagacacttatacgggtaatttattctgataagcagagacatacctttagtgcataaattgttccctttgtgctctttgtaataaacatcaccatagagaacaaacacgaagtaatgacattgaattaaaagacaccatagaggcaacagcgactggaatttgtgaaagtaaaaggatagtgcaaacagttgtgcgttgcattctgctctgaagattaacaagctgggtcaggctttgaccatcatgatgagcaggagatttttctaatggaaatccccaatcaagttcctgctgcacccagaaaggaacggcttacagaaatcttacatttctttgcacataccaaattgcttggcatattctatcacaaggtttactttccagggaatgtgatcaagaaatcatgatcctaattcctagttaaccctcaaagtttctcagaacagtcagtgcatcactgtcaacttttgtgcaatgtggaaatcagaattggtcacacgtttttccggccactgttttagattcatataatattagtgaaatcatgtcagactggtatagccatgaatttatacttcatgaataggcactcaataaatagtggattaaatcgaccgatttgatttttacctccaataatttcaaaaatatcattgaagacaaggttgttgaagctgtcacttttcttgctgaacctttgttgtgccaggaggaacagatggtaaaatcaaaagtgattagagaatcagtggggtgggggtgagattggaggggagaggtcttcccagtgagacccgctagcgtcttccctgagcagtatgttaacccaagacaattttagaaatctgtgcccctaagttgcttgacatccaaagcacacttgatgcatcctacatttctaaatatttttattgttgtttctcggtagtaatcatctggtttagtcactctaaaagtcaaggatgaaattttaaaatgcaaataaaagtgcctactttctctctttccaattcctttttgttttattgaggtataatttacatgcacaaaaaaatcgcctttttaaagtgtacagtttgatgagttttgacaaacatatgcagtcctacaaccacgtccgtgatcagaataggaaatatttttatcacttcaaaaagtttccttgtactcccgttgcagtcagtctcctgccccaccccagcccctggaaaccactgataggtaaaagcacttttaatctgaaaggtatttaatgtatggcagtgtcagtggtaataataacaagatttattcattggttcactgtatttttgagcacttatatgtgcccgttgtatgcaacccattatgctcaacccctgccctcctcaccagggataaactagtggcagagatagacaaagaagccgtctctctatcacccctatcttatagaacattcttcaatgttagaaatgcagtataatgtggccattgagaacttgaaatgtgcttagtgggaatgaagaactgaagttttaactttatttaatttcaattaatttaaatttatatagccacatgtggctaatgactatcccactggaaagtacagcttctatacaatatgataatatgatacattataacgcaggagtttaaccaagtgctaaagctttactatcaccagggtcactggtgttatgtgaaaagaaaacttacaatagaaaaataaatcctttaaatagtcacagacctgagaaagtttccttctcaagggaacacacattggctcattcaaaggaggttaaaaactagcatttaaggtaatttcatgaagctttcctttggatttctcatgcttattgtatacataaataggcaattttcgatgggacctaataaatcactgttttttatttgaacattttaacaaaattatcaaacagcattgcatttatgttcaacctatttgttctgagaaagacaacgattaagtagaagtcatcaaagttaccagaacaatttttgttcttatgttttagaaggcattgaaggtgtttaaaatgtacacttatagagtcagagtactatgcaactgtggcccttatagtttatccgtcatgcatctaaagccattgttacatctgtttctaattgtgcatggattgtccaagatacacaattggaaattccattttatttatcaatttgaagaggtttcacccatgtggtcactatgatcactatggagtcacattaaattgagaagtctccagaagttgcagtatttatttaaaattctaactttcttcagaggaacaaattctccatttctggattctgaatcctcattagccataaggttgttgtaagaatttgcagctaataggaacacatcctggggagagaccagttgaaaagtaacttggttctgagtgaaattatacagagacagtttctacttcaggtggtgttgctaatgaagctatcatggtaattttagcccatatgatccctaaacgacttcagaaccacttttcatccactaagaacccacttcaaccactgccacgttcactaccacagtataatatggaacaccctctggaattcagtaagtaacttcttaactcattggctatagagctttgcctttgtaaattctttccttttgcagtaaaagagattgtttcaaagtaatccaattagtccctaggcatgtctagaaaggtagagtcaacaacagtaaggtaatagtccttataagatatgtaagaaattatcagtcatttactttaaaataatttgtacacttttccttttatatggttcttctatgttgaagccagtggtcatccagtgattaagattagccaaactcaaaaggctaaaactaaattcaaatggtattattttgctttaattttatgcaatgctatgtatttaaatttcatgaaagtttcgtatggcattgctatcaatttcagtcaggataaatttcccgtgaaataatccacaattttcaactgtacgttgggtacaggtaaggaaacacccttaagagcttatccagttattagctggtattataaatttcaagtaattcaatgttcaattaataaacagttactttaaatgggaaagtatgagtcaagagttagtacaaaggagaatcttaaaagatgaacatcaaagaatcttactattgatttgttggtgcctttgcttgcacttctccaaattgacttgacgttttaaatttgtactgataatcatcagagtcaaatctgcttttaggcaaaaagtatccgctagttattcccctactatgaaagtgatgagatgaattgatcatgtctccagtgtatggatggatgtctttgaggaagacctactgaccttatgtttatcttctgtcagcatggtgtgactatgtggagagacagtgctatttgctaaatactttgtttttcaaataaaaagatttcacagattatgcattgtagaatttataagtattcttttatgtctttgaatgtgccaatacaatttttatgaagttggaactattttatctattttaatgaaattgtaagccttctgtgaattcttttattaattttattctgaagaaaatctgaccaggttagggaaatcaggtcaggttacgacgtgatcccagtggaaaagctgaactgtggactgtgatttaaaatagggaagaggtactgaagtgttgtttttatttttgtttacaaatcagcctttctaactattatgtactcccatccttctatctttttctccaccagaacgtattaacaggcatgcatataattaatgcttttcttgagataatattaaaattaacttcatctgtcaggccgtctgggctaaaagtacacagtcagatctgggtaacatttgagttgatgtaaatatgcccacacatactgacaatgcttaccatttattgtgtgaatgaaaagcagtgtaaatattgtttgttctactagggaagctccacattttaatcaaactttgaccgtatttctaaaatgccagagcatctggaattgttaaaggaactgatagtttttgtgtttttaactgttaggatacttgaaatccaaagggtaaagaaactcagctgatttatacgtttcttcctctttattttaatgtgataaaatgtagtttttgtcatgggctgacaaacagtggtagactacactaactctgcgtttgctgggtttaatcttaccctctcaaggcatggaatgggagctcacttcagacccagccatgcttcactgtccactgccttctcatggatatagtgtgaacattaattagatgaattccataaagtgctttaagctctttggagaaagatactcgctgcataattattcttaactcccatacgctcttatgatataaaccattctgccaggaaatcctttttagggattatcacttaaaatgaaattttcattattaaaagcaggaagaatatacatctactgacagacgaaaatgtgcttaaggcgactgcttttaaataggcagaaatcctgaactatggagccatccatgcctgaaaatactgagtaataatgaaaactggtagcaaatttggaatattaatcatcacattaagttgcaaagaaaaaaaaatacaagccacatgccctttaaaaatacgtgcacaaatctttattctagaaatatataactttaggcctaaaaaagtacaaaaagtaaattattttatggctctgaaagtatccttaatttactcaggtgacaacaattagtgtttaaagagttagttttcaatcttagctacaagttggaattactctggaagctctaaaaaaacaaaaaacaaaaaaaaatagagatgcctagttcccacctgcagaaattctgatttgatttttctggtgcgagacctgagaataggaatttttttaaagcttccctagtgattctagtgtgccacctaggttgccttaaggtaaacctcatattatgcagaacctagcaatcacctatcctgattttatagacgaagatcataagacccaagagggcaaattgatttattcaagattgaatatacaaatgatagaagattcacataagatgcagtatacagagtggcttgtggattcttgccaatgcaggcagcagaattttctttagggttcacccagttcaggcacctctttgcagcagcacttgactaaggttcttctgattggatcattatatgggcaaaaagaaaaagcttaattgaaaagagctgaacccacattgtggaatggaagatatacagtttacacgttataaatgattaatattcatgaaagcatactgccctttcctcttcccttcccatagatgacatcattgcattggtgtagttaggttggtggtttcttgttgttgatcttggttctgacacagttcatcacttattatcctggcttattatctacttctacattcattgttcactcactcactaattaattcaacatggtttttattgttttggaccggttatatgcctgcaacgctacgtaaggctgaggatattacaatgaacaggaaacaaccctgaagtttaaggtatcaagcctttgagttactgtcttttatcatagctgatataaaattgaagccccactttttttgttttcaattactgaaaattcagtgctaaaaaaatgtggatttttattcaactagataaagtactacaattaggtttccactgaccttggctgtttttgttcccagttgccattacataaatctgtgccactcacaacttaggaagggtgtaacattctctgtaatagtttgcctttcgaatagtgtttggattcattactgtccctcgcagtttggaataatgaccactgaataatcagtgtttggagactaaattagtgctgcaaaattccctcaaattacctactgttcttttccctgtcgatgtatcctcatattcactatgattaccctgagaagaaagatattgttgagaaccactttacctactcgaagttttggtatttcaaagattcatacttatgtcatgttgattacattagcactaatactattggcagaattctaattcacgttattttctttttttccaatttctctccatgcctatgtgttgtcccttcgcagctataaagccatggccgattcatgggtgcttttgttaaggcgttcagcagtcacgtttgtagatttttgaatgggacttagagcccttttttgttctttatgtatttctctatttctcagcaaaggaaatgcagacatgcaagaaatagtgatcaaatgtcctgtgtactattgtgggtgtcattaatggtatagggagaaatagaaaatagttgcaaagatgcatttaacaaataaacgaggtcttgagattcaccatgaatgtggccccttctatgaaaagtagttaacatccaactgcaaagttgtactggatcagtttgactttaacctttagctaatatgaaaatatggaattgtgtggtggtgctcacaaaaaagaaaactcatttttcttaattatcatcaattaacatgtactgactacccatgagggaaagttaatttgctcttgagtggaaccagttatttgccctattatttctcccttgcttattcccctctccctccctcctccctttccattcaacaaagaaaaatagataaagcaatttctgattagccagtgaaagcctctaacataaaatttccaaagatgtgccataaattatccacaaaatgtaaaacttttcaattttggtttgcattttcttttttcttattataaaggtaataagtgctcattatagaatttgaaaaatataggaagttgcacggaagacgaataaaatcagccataatcctacaaacctattgacacttgtacatatgtttgttatctctaatgcattcattatgataatgcatcttttcaaccaatagagtaatcactggtgactttcaaatttgcctactcatttttcactctgtggacttactttactacctcttgccctttttcagtaaatgaataaatatttaagtaagtaaatacaaatgtaataacttatgcgctcaagcacacagatacacacagagagaatttggaacttcggaaatgccatcctctccctagggccgcaagtgagttgataagcacgtaaggaaggataatcaggggagccttctcgtattgcccagatggctcaaaattcgtcatctctaccaaacaactatttggagctttgaagaaatatccatgacccctttgaattcttcagtttctttcgcgttcactttgagaaccaagtgacaagtgaatttcctgacttggtcttttaaacctgttagcgcagttccattgagattttgtgggcacaagattgcaatgaagagatcaacagggagaaattcatttccctatatatgtgcgattaatccggagtgctaagggcagatataaagcaggtgcctactcctgtataacttggaataaaaccatttccaaaggctgatgatcctcaagtcttgttctgcaaatgactgatgtataacttcaggccaatttttctccagttagtctgtgtcactgggagtcccatttctcggggagcagccccatgctttgtcaggtgcggagcccacagaaggttaatgcgaaaagaaggcctcttgccagactgttttccagatgatacgtagggttattagtttgagctccttaagaagatttttctcacctgtcctaccaacttatgtttatttcattggtgttagagggtttcagtggcggaagtaaaatatttagcggggaagggacagcgttcatgggaattttgcctaacttaattttgtatctttagctcattcgtagtcattgtactttgtgttttgtcaactgaattttgtttgcatacaaaggcacaaaatgtttgcttcagacctgtcactcttatttttagcatggttagacaaaaactgagatgctttaattgtctaacttatcccagtttaagtgctgcaaaatctcccaggcaatgtcatgggcaactaagggataaaatcagagatttaaaggtgccaggtttcccacgcttctaacagttggcgttttgggtgtatacaatccctcagctttcttctttagtttatggagtcttgtggagggaatagcaggtttttagctaaaattatcatgctgtcgagttgggtctctagtgcatcctgaagagcttgcattatttacagaggctgggctatcattttaaatcctgatgcttcaatgcccgttatcattcttgacaaactcttccagcccgtggtctgttttcctctgtttgcttccatttactttcctgagcaaccagctgagcaaagatttacataacttttgtttaaacaaaccctgtacagttcactctttcagccagtatgtaaacacttttgagacacagttacatttttctattttagtcccagattctgtttatttgctacattttttgtgcccacatttttgtctttgttaagtctcttacagattcacatgaaaaaccagaaaccgtggctgctcaaaagtcattaataatgagatttttagctactgtttctgcttgtaaattcttcatttcacataatacagtctcaaaaggccacagagaattcagcctcgcttatctctgtgttgcagatgatggcttctagccttacccaatcccagtgcagcttgcttgccatccaggagtcgaatttgtttccatctgacattagcgtattaaaaagattggagatcaacaagcaacaatgttcttgtagaaaggtaatcaaggtttagagcctgtgtgtcatgagactcctagcatttgaaaccgctaaggggttgaccaccattgtcccaagcacctgtttaagattctttcctatgataagggacctaaagtgattagcatactgataagattttcctagaataacctatttatttcagtattattctttcaaatcttaattaccatcttttcctttacccagggtcttctttctacctctacgacacatttaattacctatattccccaacctgtaccatattaaattttgaatggaagttttatagggtaatttattggaaggatggccttgagtgtcattatgttcaatgaatgccctattttgacaaagagatgactaaatgttattgaaatctttttaatccaccacgcttctgcttagatgtaaatgcaaatctgttctttacatttgtgattgaattgaacttgaaaagtaccgccatattgattccttctgcaaataaaatataattacatttccctaaactttctacactctcccaagagattggctggctttgtattgtagatttttggtgatcacagaggacaatgcattatcataagaccaataagatttatttttaccttggtaaagaattttaatttatttctagtttcattttcatttatatccatctcttctcaccctctgctctacaaaagtatatatgactatataaattgaaaaaaatatcaagtgcaaaattacagaaataaataattaggttattttagtggaggaaggtttgttgtgggtggaggaggagaggagtgagccaagaaaaacgagggaccatacgtgatcatatttttgcagctattttaaattgtttgtgtatatactttaaaatattataaaataaaattttaagtgcaatgcatatttggagccaatgatgagggataacttcagaaacgtagcatcatcatctagtgctttcatagtcctttcaacatttccagatagttttaatggcctgctcatggaggcaatgccctaattttaacatatctcttcacaactctgatttcttgcttcctaacattaaatgtcttcaaagcttctttcaccactaattccttatcaagaggataagccagtttattctttaagaaaaactagctacacaaaaccgtaagtcattccaacataaatccttcactatcctctctctatagatttggttttgattcctcctgctgaaattcaaccttctttcttcagctatccacacgtcttaccctctaacttccctcaggagtgtctattagctcccattacagtgaccacagtaatatagtaatcccctgctgttctcactctccacttccttacactgcgttttaagtctcttcatattctttatcaccttgtatcatgcatcggttttcttagttgtttattttatgttgccttcataaattccatgagagctcactgccgtatctttagaacatggaacagtgcttggaacataatgggcattccttaaatagctgtagaataaactttcaaaatcaacaataatgtatttgccaaatccattggcttctctgccattttatcttgttcaataccactgcgatattccccttcctttttttttttttttaaagtctgtaaccctttagcttctgtaatattcctagttttttattcctctcatgtgtcaaaatcatcagttgaggcttattgttttctctttctcactctgacctcacctttgtttacatctcatcttctggctttggctatcctgttttttatctctgttccaacctgtatttctagccctactacctggacatgacatgtggatatctccgtatgaccgcagtttccatatgactttgcaaattcatccctgctctcccctccaaagtcatccccacaattgacttcctgttccttccaacctattaaggttcaaacccacttttgctcctcctttgcaggctacacttttccttctcagtacctcttttttttccaagttcttagataaaagtcatagtaccttacgttgtaattgccactggtctggtctttctgcctgctttcctttccatttgtaatcacattatccattccaatccatttataatactgtgatcagccataaaaataacatttatcatatcgtttgtctccttaaaacctgtagtagatcccctctatttacaagatctggtataaaatcacccttcctgatattcaatgcctgttttaatataatctcaatattatgcgtcataaatccccctgtgttcttgcactttttatttcttatacatctcatcaaccatgtcttatcaactctcaaaacctgtattggttttcaggaaaactcataaattattcttttgtagaccttttgtttgtcatctttgaagatctctctctgaactacaatattttgtctgtataatcaatttggaaattcatcaggtattgaaatatgacatgtcttctattgtcttgaacattaattaaaactttatttgactttttatatgcttacatcttgtttcctcacggagtgttaacctactagaaagtaatagtttaatcttatatttattttaattcagatttagtagcatactttacacgtggtaggatgtgtaactgccttacaccttgcttacgtgagttattaatgttttcgtatatttaatctgaggatgtactagcaatgttaaaactgtaccgcatgaaattgagtaattgaactatttgttttaaatgtgttgcttaacttattgtaccattttctcataatcacagctcaagttaactttgtggttgtacgtattatttcttgtgaaatgccaacaaacttagagcaaggaaaataacaggtataatcatactataaaggcaaccttaacactagcatagtctcttagctcatatggtaactacaataatgtacagtgacaaagagaatattgtactttcttagcacacactttcctactactctactgttgtggataaaaacagacatactttaggagaaactatgttatttccaaataatgccttaaaggttactccaggaaaaggcatttacataaactatctaggaaaagaaccttttaaataatataaagagctcacccaaaaggactgaagtgtttagttgaaaaaaagtaaaaatgtcgaagactttgaaaaatagtttcttgcagtatattttcatcgcttccacttacgttatgaagacattaagcgctagtttatcaaaaactatttttgtacatgtcttctaatgacagaacaatgtcaacatgattttcatcattgagaatgcgtaaagaaaccctttgtacagttttttctatgaatgttcccctaagattaaagcaaatttccaacacgaattaggcactccgaaaggaggaggggagggaggggagcaagtgctgcaaaacttcctgttgggtactatgttcactatctgggtgatggaatcaacagaagcccaaacctcagcatcacgcagtatacccttgtaacaaaccaacacatgtacccctgagtctacattaaaaatagagattaaaaaaaggaaatcagtatataatctaataaatacctctcaagctttctcatttttaaaataaaattttagattattattttaggaataaaataggctcttcattgtatataagttcatttctgagttgcaaaaatcctctctttatgtttttttccccgtattagcatgtttttctcctgtttttccccactcaacttggctgccacaatcagaaagcacaaagacaattttttcttgcgcttgtaaatcaaaaccttagcatcagacaaaataactgctccaggtctgtcaaatagattcatttgagctttcttcatgcattgaatacggcagaatttctgacctgaagaaatctagccttttccaaatttgctttaagaacattttgcaataaatttaatataataaaaggaaaaaacacatcaggctagaatttggaaccgattgttattaaaaatctcaagtctatcaatttaacttcaacaaattacttaatttctgtgatggttaatttcatgtgtcaacttggctgggccgcagggtaccgagacatttggtcaaacattattctgggtgtgtttatgaggctgtttctggagagattcacatttgaatcagtagagggagcaaagccgattgttctcccttgtgtgggtgggtctgatccaatcaattgaggacctaagtccaatcgattgaagacctaatcaaaaagcctgattaaaaggaactcctgcctgatagctaaagctggaacacccatcttttcctgcctttgagcttgaattgaaaccttgggtcttcttgagtcttaagcctccagttctggggctggaacttaacgtcattggctttcttggttctcatgcctttggactcagacaggaactacatcattggctttcctgggtctccagcttgctgactgtaaatcttgggacttctccagattcgtaatgagccaatttattacaataagtctctccctctctggtttcgagagagagagagagagagacagagagagaaatgagagcacaagaacgtgagtgtgagagtgccctaatataatttctctaaatatcactggttactcttcaaagttataaaattggtataaaaggtgacctcaatttttcatggagttaatgtatgaaagtcacaattaaaaaggaagaattagttctggtgtcctgaaagttatttgaataaattaatatgctatggaggctttaaaatactatgaaaatttaatattgtattattcttagtgttgctatttttaaatagcactttttcttttcctttttttttttttttttttttttttttgagatggagtctcactctgttgcccaggctggagtgcagtggcatgatctcggctcactgcaagctccactgcccgggttcacgccattctcctgcctcagcctcccaagtagctgggactacaggcggccgccaccacgtccgggtaattttttgtatttttttagtagagacggagtttcaccgtgttagccaggttgttctcgatctcctgacctcatgatccacccaccttggcctcccaaagtgctgggattacaggcatgagccaccatgcccggcttaaatagcactttttcttgtgagtcactttttaaatatttgtgcaaaccttgttgccattctactcaagctaatatcctaaaccgaggacattataacatttcaggagtcaaaacttcagacacttaacatagtatcctcaggttcatccatgttgtcataaatgacaggattttattcttttatatgactcaataatatcccattgcatatatatgcaatattttctttattcatccattattaaacacttaagttgattctatatcttggctattgtgaataatgctgcaataaacatgggaatgcagatatctctatgacatactgattttatttgctttgtctctgtccccagtagtggaattgctgtatcgtatggtagttctatttttaagttttcgaggaacctccataccgtcctccataatggatgtactcatttacattcccaccaacagtgcataagggttcccttttctccatattcttgccaacactttttatcttttgtattttgataatagccattctaactggaatgagatgatatctcattgtggttttgatttgcattttcctgatagtgatgttgaacattttttcatatgttgtattaactaagccaaacacagaaagacaaatgcagcttgttctcattcatatgcacaatctaaaaacatcgatctcatagaagcagtaaatggacggtggtcaccaaagaatgggggaagtaggggaaaagcgagaatggggagaggattgtcaatgggtacaaagtcacgattagaaaggaagaattagttctggtgtcctgttgcatagtatggagactattgtcaacagtaaggtattgcgtatctcaaaacggctagaagagagggttttgaaggtttctaccccaaataaatggtaaatgtttgaggtgatatgctaattttcttgatttgatcaagtaaaggtcttaattgtttggcaattaagactcatgaatacaaataaaggtcttaattatttggcaaagcatgctgagttttgtaaacaattcagtagtgatttttgagaataggtcaatagcaaatattaattaaaatgtcttctatttatgacctacagctagatggtaaacagatagatgatagatagataactgatagataactaatagatgacagataaatgataaatagataaatatagataatcgagagagaatacctttcccttcacacacgtgcatataggcacactccatttctatcatagttaccaggattcagacattttgtctcactatttttctcaatgtgaacatgcatataggaatattatagtttttgttctgtgcccattttagttcgttttttaatatttcaggacaaaggcaatatggcggtttcactttgtttttcatttttgcttatactttttaaagctcagtgtagaaaagtttgaaaatacacaaaagtattaaattaagacagctgggcacagtggctcacgcctgtaatcccagcacttcgggaggccaaggtgggtggatcacgaggtcaagagatcgacaccatcctggccaacatggtgaatcccgtctctactaaaaatacaaaaattagctgagcatggtggtgtgtgcctgtagtcccagctactcgggaggctgaggcaggagaatcgcttgaacccgggaggcagaggttgcagtgagccgggatcacaccactgtattccagcctggtgacagagcgagactctgtctcagaaaaaaaacaaaacaaacaaacaaaaaagcacctatagtctttctcccataggttgccttcttaatgggttttacaccttttgatgttttcttgagttctgtcccattagcaagtagtattgtacaaaaaaaattttatcatcttttatttaatattttattgatgtttaataattagaattattttaaattttatatgtcattttaaaatgcaatacaatatagtaaactcccagatgtgattgtaaataattaattattctcccattattgggcattgggactgcttccacattttggtcactgcagtgaacatccttgtacatgaatctgtatgttgaagttgatttcattccacactccccttcattcaaggggctccaaccattctcgttttctttcagcttctttatatccaggcatataaagttccttcctgactcgggagcgtcatacatgctgttttctccatctggataagtagttaattctgttcttctttgtgcatctcccgtttcagtaacttcatctccaaagcctttccaggtcactttatctaaagttacaccataatcttgcaaatcctcaactattgagcattattagtctccgttatcattattctccattattctctgtgaaagcatcccgtgattttcttttgtccctattaccacaatatgtgtttattccgtgtatgtacatctttgtttgtttattgtttgtctatacctgcaatgaaatgcctaaggtcaggaactgtctgatgcaggatgcaatgcgctcaataaatatttactgaacaaattaattcatttgctcagtcttgcaggcaaatggtacttctgtatatttaaatatctaaaatgaaagcgttactcgttactgttggttgtcaatcaaaatttaaatgtcgatgtttaagcgtgaaagacctctgtcaagttaatctgtacttacccaaaggctattatgtagaagcgacataaatattttcctaaatgttgattttcatattttaagaagacaatgaatgtttcaaagcattttcttctacacagctatttattctggagagtggggcatatgtttcttaatattgttaaaattggcaaggggatactgttgctatatacaaagaacacctaatcatcatgcagacgttttgtttctggctctcagttatgaaaagcagagattttaaaaagttacctttatatgctaaattaggaatggcagaaggtaatattctaatgtttataagtggttcttctctgagtccttggtttctatgtttatgaattctctttttgaaagaaattatagttattattaccaggtctattcttttacattgtttctaattctatggtgatcttcaaaatagagtatcaattttaaatacttgggaatgaaattattcttcccatatcatttctttgtatggcatacattgtgatttgttgtcccatcattgtttcagtatgacctgttactgcaaaaacatattgagataaatcatcccacatactctcggccaggacagacatcacactgttgcagcaacacttcagatgagccccattcaaccttgtgtttttatagagaaggatgccacatgtttatattcatttctgaagattggctcatattatttattgaaacatactagtttaaaaatctgtccatttatataacacctggtctatctacataacttgaattacataaatataaaactaaacttcccctcttctccagtgtatagcttgcaagcaagtgcatgtgaaataaattaaagccttgtttgtgtttttttcatcatgtgagtacaagacttttcaataaaaatgaattacttttgaacatatttgtttggacaacaaacaagagaaaagatctatttgattgatagtggacagaattttcattaagttcaacagcagaaataccacaattgcatcattcaccttcgtgtatcaaaagaaaacagaaaattagatgtgatgaactctacacaaatgttcactatgcatactttacccattaaatacattatcaagaatcatgtcagcatgacattctaatatagcagctttacaaaaacatgtaatctaatctagggatgctgttgtcctctttaaatcagcttcaaacatattctgggttgatatttctcattcttttttgatccacattgtttattcacataatgattatatttaactgaagataacagcattatcaaagtgaaagacaaaatagatgtttaataggaaagtgagtatcgaatcatcttttttctaccaaaaacatctataattatgaagtatttggttaattattttcacaataatttaaaagtgtacaacttgccgatttttttgtactttctacttttcatgtctcgcatatatctctttaatatctaagtatttgagtcagaaaagagccagtaccgaataatgggaatctcactgaaatgtgataacaatctggggcctggtcctgggacctttatctgcaggacaacttggacaaatatttagacccccaattcctcgtctttaccctaggaataataacacatttttctgacctcatacttcacgtggatctcaaatggaacaatcatctgatagcactttatgaagtatatgaaagcaataaattatcacaataagataattgcaattattctttggcatagtattagtgatgtctttatctgtctgacaaaatcaacatttctgtatggtaactgcctttccttgttttaacagaagatcatgccagaaaagatgagtaggtagatacttaacttgttgttcctgaatctggaatgtattgcagatgtcccagactgatctttgttcttttttttccttacaaatttcttttcacattgacagtgtgatatttctttaaatgtgcaatacatagctaaccttatttgtttgtgtttactaattaaaatatctaaactgcttaaaggagaaaattcagttttaagttttattgatttatacccttcttcaatccacataggattagggtagtatgtaacaaaatttcaaactataaatgaaatattgagttttgtattaaggccaaggatgaggaaaaaaaaagtaagtatatatggaaaaagaatggtattgaatgggagttttgatggagcatgttgacatcatgataatacctattatctttatattctgaatgtcagaacaaaattagagcaattttcccttatttccctacaatacgtctgtcttaataattctaagctttcctgatttcagtagtaatctgtattttgcaaaaggcagcatgtttataagatatcaagtaaactaagtttatggaacttgtaacagcatttttaacaacatttctccctagatagttcatggtagacatgaatttattcaaaactagtatgtagaaaaataccattaacaaaagctctgaaattatattagaggagctgaataatgttacttgagaaagaataaaatgttatttatgatttttggtatcttttacccactatatatggccatatctctgaaaaactttagtaatatgtactaatgcaaatatggtagtaaattatgtctacaggtgctgataccatagtagataaagtatgataactttattttaaaatatcatatttaaataattaatatacagtactgggaaagactattttatctattctctcactcttgaataaaaaaatccagaaaaaaataccttgttttggtaagattatatcaatttatttcccaaatgggtagagggttatttttttctgatcataaacgtatgtctcttcattataaaaatccactaaaagtgatagaagaaaaccaaaagaataaatgtaaacaatgatgccattttccaaaaatcaccttcgacatttttctggatattgatacagtctaaatctcttttcggaagactccctcctgtgtaggttccccaactactctgcaatcttatttcctcttgttctgttcttgtagaaaggagacccattgtcaccatgtcaaataacacaaaatggtgcacgtataagatcattgtctctgtccattatttgccagaggacctcaaactttttcaggtggtgggcaactggatgtcatgctgctccttgtacaacagaacacaattcattatttatatggttatttcattttaagaaaatttaactttcattagctggaaaaaaaaagaagtggtttttaagttgtttagaaatgtgaaattcaattttcatactgcaaaagagattcaactgcaaacacaggcacacatgtctggtgtaagaacgagttgtcatacaaacccaaattagctgcctccacgttgtctttgttaacaagtgtttgtttgctccttgttccatcattcagaaatgctctttagcaggaattgatggaacacagtcgcagtgacctcttcctgtctttaaaaatcgagatgacatttgcccatctgcagtgttaacatagttcctcaaagaccactgacagtggggtaggactgtattgcgcaagttctctcatttccctagaatataattggtccagggccagagattttagctcatttagagcagcaaggtgctcttttaaaattccctcacctattttgggcttcatttcccttatacggttatgccttttccagtctgatgaacattctccttgacagagcagacaagcaaaaggagctgcacactgctgctttctgtgtcgtctctatccctaaccttctcccttctgccccaatcagtgaaccttcgtctttctggttcttcttcctccaaatggaagtaaaaaggccctgaatgttgtctttaccattatcacgagcctcaattcattccaagctcagcttttcctcactgtttatacagttctatattgttcttctaatatttgccctcagttctctgtccctcgtttcttcccatgttcatactctattagaatctgagcacctttgaggttgtccatacagtggcacacatctttgttttatactcactgggatgatttgccattatattgtcaaaattttattctaaagagcttttacaggctttcttgagccattttctcttgaaattcaagatcgttgaatctctacgctttttccttcttaatctaataaacatacacccccacatacacacgtgtgttcctgaaagacagatgccacttgactcgtcttatagattgtctaaattgatcattgtgtgtggggataaaagggtgaattgtataatatccctgatggttcacgaagtctgttcctgtataacctgattagtcttctgaactcttttaaattctgtctgcaaatgactgaggtttggcaatcagcctatttcagttagttgttttcttgcataagaagggtccatatgtactgtgtgaagtaagagagagaaagtacttagatttgctggatgccctgattgttagcatggctaaggtattgtgtaagtaaggagagcagttaaaaatgatattgtttttatttcttaattgaggtaaaattttatataagatgaaacagacttatttgggagaggaggaagagtttgttcttacataacatttcaacctgtcatatttagttgagaacttcaatctgtcaagatactttgtataatattcagattctgccatctaatatattttccacgctttcttactgggtgtgacagtaacttatactgtggcaggtgtataagttagtaaagatattaaatgctcaatctgttaacttttgtgaagtggtcccactgataaagtgacacctcaataaaataaaaatttccattacctcagaaagctttttcatgctaccttccagtcaattcccagccccaataggcacctattcttctgatttatatcaccatagattagttttgtctttttaaaaatttgtataaatgaaatcatacaaaatgtactattttgatcagcatactacttttgagattcatccatgtaagtgtatcagctgttcattcctttattgatgattaatattctattgtatagatataccacaatttatttatctattctccttttgatggacattcaggtggttttcagtttttggctgttatgaataagatgctgtggacatttgtgtacaagccatttgtgagcatatgttttcatttagtttgagtaactctgtagaagtggaatggctgggtgaaatgtttaaatttatgagatattgtcaaacagcacctaaacagttttctaaagtggttgtgccattttgcaatgccaccagtgatgatggagagttccagttactctacatctttgtcaatatttggtcttgtcagtcattttaatttttgctatcttacagaatatgtaggtatattgttgtggttttaacttatattcctctgattactagcactattaagcatcttttcatggatttattggacattcatatagattatgtgtgttgaagattattacctttatgattattgggtgaaaatagtatcattttgaggtcattcatataacttgaagactgggaatgacagacattttcctgttttgtttcttttctttttactttatctgaagagtctactagaatgcagtgttgctgcctgagcagcagggcattagctttgtaaaagctctgttccttggcaaccccaccactaatatgaagtgcagaacatttgaattgtctttgaccagcttcagcatcagcactattttttttttttgctagacccctagtaggtatttaaaagtacagaaatagaatttaatcatgctttttaccaaatgtgctatgctcttagagattctttcaacgtgcataaaaattctgcagtttcaccacataccagtaaaagaaactcagtcactcatttagccatttagtaaaaagaacaaattaactgatgagcatagtggagacctcaaaggtaaagaagacaatgtccctgaaataaagacaatcataaattttcaatcaaaataatgaaatttaggctgggcatggtggctcatgcctatgatcctagcactttggaaggctaaggtgggaggattgtttgaggccaggagttcaagaccagcctcagcaaaaaagtgagaccctgtctccacaaaaaaattttaaaaattatctgggtgtggtggtatgcaccggtggtctcagctactcaagaggctgaggtggaggatcaccagagctcaggggttggagactacagtgagctatgattgtaccactgcactcaaacttgcatgacagaatgagtccttgtctctaataataacaaaatttaatttttatagactgtgaaaaaccattatgtagatacagttcaagtacagtatgattttataggatagataacttttgcttgaaaatgtattcccaatttataggatagataacttttgcttgaaaatgtattcacaatagagttagtatttggggcacacctttatccatttaacaaacatgttttgagcactgccaggtagcaacacgttactaggcactagagtgagaaaagattacagttcctgctctcatggatctcatggtctagtcaactggaatgaaaggattacataagtagaggtaaagacacacatgatggaggatggagaatagtcaaaggtctggagaatgaccaggacgtcactgtgagttgtctaattgcactgaagcatggatgaagaattggaaagtcattgtaagaagcctaaaaaggtatctctcagggatgctatgaggttctgaatgttatgtacgctatttgggcttcaacaggcaggcactgagtattcagtataaatttttgagcagggaatccaccagaagaactatgcatctggaggattaatctggaaagattgtgtagaatgttatgcagtgaaagagtctgagatgaaacagttaggagggtgtattaataacataggtgaagtgtaatgaataaccaggctggaggaaaagcaataacgatggaatcaaccgggcaagaagtataacaattaggatcagtaaaatagaatttggattggaggaatgaaaaaaaaagggacaaaacaaagttgaactgctggtatccatactggaaaatacagatgtcattcaaataaataatgtaatgaatataagaaaccagttttaggagtgaagtggatgttggcttgaaaatatttcctttgaggtttcagtcaaatgaaaaggtcctgaaatgctacgtggtagcctaagaaggaagcgttcctagagagaaaaaaattagaaaagatttacatttgataatttaatcttttccttcatacaagctaaattgataagaaagtaaaacctatagttttcaccactcttttacaaatatccctaaccttttagatattcacatgaataattgagaaaaatctaacagatgacttgcttatgtcatttgtctgctttatccttaggttcctctggcttatatattgttcaataaaatacagatcattgatattgtacaatgtactgataatggggagtgaatccatgcttgtgcattcttttttttttttttttttgatttgcagagggcgtgcccagtcaacaagagaggcacaattgtttttatcatcacctcttctcatctaattccatgaaggagagtagtattaccatacaacagataatgagttggaaaacaagaaacctaacctcagaacttaaggcttggggaaaaataaaagagtaatttgtgtttaatgcctgtataacttggcaagagggacatataaggcttagtgatgcccaacatgtgcttagatgtggattgttagttgatgtcttgggggttctgtaatctaagctaaatgctcaaaatcaattaattgatgttagacacagagatctgctttgatccctctttatcgtatttctaggccttcccattctcaagagcctgagaaacgacagctttccttaataacttgttatttgtggtaggagatgaaactttgataaaaacacaattatttttaaatgtctctttttcactctaggctgttgtatgtatttcaaaaagttacttttgaccctttccagaatgagaaagcaatcaagaagattataatatcttgcttagttttctgctcaatttatcaacaaatatttcttaagcaattattaagctgagcagtgctcagcgctgtacttggtgatataggaaatggggaaaagactgtctttaaggcctttataatagtaattacctcaacttgtctgtttcttttccttaccatttcgccaaattcattgatctatcttgttctcaaagcaatcgccatagttatattgtaacacagcattttctagggtgtccccattaagttgagagtgttgacaagaaaatacaagcttatttatcattgtaaaacttgagacacctagtagttaccctaaattaaatatttgttggagtcagtcacactaaagagaacacttactgcattgaacaatttacctacattagacagcatttaaagactatgccacagcaaaggcccatggaattcttgtgaacacagaatagaagtgtattaaggaacaagcttaattctgttctcttaaagcacaacactttctcaaaacatattttgaaatcacctttgaccattttttttaactaataggtgggtgggagttagggtaggaaaacacaagcagcttcatcaaaacgatattctattttcttcaaatttgtggggaatcatacggcctctcaattttctacattatgctaattatgatattaatctctctgccagcaaatgaaaataatacatattagatgtagcaaatgtcaataatgacaaaattagtcatcatgcagatactcagggattcccaaaatatgtttggattatgattgctagctttgagtttgcccagaatcgtttcaataaaaataagggactcaaacacatttggagcaaaactcacatcataaattttagacatagctctgccaataatgctctcagttatattttcagtcctaatatttcctctgagttccagaccagtatcttcaactgtctgattgatactctctccttcatttctgtctccaatgcattaagtcctgtgtatttactttccaaatgccacttggttccatgcacttctctccatttctgccactgactcctcctcaatccaagcgaccatctttcctcactttaactaccatgatatctcctgcttggtctccttacttctattcccgggctcctccaatccattcatcctccagcagagaatgatgactagcaccttccacagtgtctggctaataggaggtatccaatcaataattgacttacagagtgaaaatataggcatggcaaataccagtagagaactacagggttttagaaccaatgacattagatacttccatcaaatatttacagtgtataatcaagttgacttgcacattgtcttatttttgaaaaacaattttgttggctttttctatatgcacacatacatattgtatcaccctctacccgccaaatggcttttgaagaagtatttatgtggctccaaattgataatacctctagagagaagagaaattagaaattttaaaatgacctatgcttcctttcgaatatcacgtcctgagacagtgttttttgagttacgtgcaatatgttccacgatgaaacatttaatgtgttcagaggcatgctagtaatcatgtagaaagaattttatgcctgaagtcacatgttctataaccaggatcacttaataagaaaacaagtacagctgtggacaagatgcctttttatcagggaaaggccaatttgttttctttgcaaatctaagtaaatggagagaaaaacacagcccttaaatgttttctatttgtcctgaagttctcatgaatgagttagaaggcgagaaggattaaataaatccttgaacgtagagagagctaacatttattttagcaaactaaaacctattcgctttgcaaagttctgttctgtactttgtaacaacagttttctttaaaacaagagccaccaattcaaatgcctttacagaatgattgaatgctttcatgccccacctaaaggcattcaaatcattaatcaaacaaagttctaacgccaaaacatgtctgggaccagatttaaaatgtagccctcagtttcagagggcaaaaacttaacatatttatattttcctcactttaggtaacactgtattgaatctctgcttgaaattgaggagcacgtgattttttctttttggcccagggcagcatttcttggaagagaaagaaaaacaacccaagatacccttacaaaacatgtagtacttaaagctctttatgatgaattaattttggtatacacattaatagcagtgataataacaaatctatatatatatatataattgatatgaataagataaatacatcaaaaggaaatttcattacaatttgatattaggtaaatgtcccattaaaataaattgctactgtacataattttccttcagttcattggcaggatgtttgctttggaaaataaacagtctatttctagttttagaaggaattctcattattcttttatagcaaccattatcaggagcagatgggaaattgtaccaagagcatatctactattatacctcacaggaaaaagagagtattaaatgaaatctaacaaggcctgctcctgactctagttcctgtaacaaatgaacacacacatttgtatggtttcagcatttgtattagtaaggtacaataaatgtttactgaaattgaaaaaaaaaaagataacaggagaaagaagaggctaaaaaggtgcattttatttctgatcgttcattgtaaagactgctcctttttaaaataatcaaattttattttatatacagagggtacatgtacaggcttgtcacaggggaatagcgcatgatgctgaggtttggggtacagatctcatcacccaaacagtgagcatagtacctacctgatgagtagtttttcaaccaatgcgcaccctccctccttcccacatctactagtccgcggtatctgttgttcgcatatttacgtccatatatgctctatgtttagctcccacttataagtgagaacatatagtgtttgtttttcctgttcctgcgttaatttgcttatgattatggcctccaactgcatccgtgcttccgcaaaggacatgatttcattctttttatgactatgtagtatttcatggtgtatatgtaccacattttctttatccaatctaccattgtttcacaactagatggattccatgtctttgctattgtgaatagcacaagacaggacctttttatttgactgagttccttgcaaattactaataaaagatctggaggtccttagttaaaagttgaatctgtagtgccgttcaaatttagagatgtattttctgttcaagagaagaaagccctcattcggtcatgcttaatattcagctgtaaagtccaaaacatatgagaatgacacaaatggaaacattttataaatacctatacaaaggaggggcacttagttcccctaggcctcttaaaagtcctctagaaagagggtacttttatgctaactattaaagatgagtaacgaatttgtcctatacaacttaacagtatcgtcaaggaagtagaaagttactcagttttactgggcattggagctaagcttgaaagtgaggaggagaagcggcaggagacggagccgagaaggcagtggggagaagaggaggatggtcctttccatgctccctgttgtactaacatgtttggatattatcttatacttcatatatggactggattcttgtccttctcattctgagctctccttgaccttgattcttacctcctataactttcattctttctttactcaaaaaaaggccatttatttcagccatttttcactgttttcttatccttcctagttgcttttctatactatttttccactcttttttttttctatactattttgcccttctctccattttcctaactgctagatttccccaattttagccatctttcaattgttctgactatcctcaggtgctcccacaaggttatcagaccttccaccaagacggaatccctcagtctatggacaggctaagttgaatgggtcctggtgctgtgcttagcatatgccttgagtatttgtgcatttattttgcttctttacaaaaatccatcatccgatagaagttgaaagaaacttgctgaagcacattaaaatctctgaaaacagtattggctatattttctaataattagcatgactggttaacttgctttatttatcattgaaaaaagtatcagaaactgtatatcaaactcctgaattcttggcactgacgaagagacacaatgagaatgaccttaggataaaaaaacaagataaagcaccatatttgtaggaaattgcaccataaaagtctgtttcacaactctcccaaatttcattttattacatcttttctcttgaccaatcagtaaactcggttaatgatttacctgtctcaaaataattcatgaacaaaattacaagtaaatctcagtattggattcttgaaacatctccttgttcaatgaagtttcctttttcttccctctatttccctgtatttatcttttcttccagttgcattttatctcttctgtttttttatcttgctccctagtttgtgattttttgccaattttttatttcctacataattcatccaatctgtcattgtacaatttcttataactgcttcttagcttattccttttcttcatttgtcacattctatttttcatctattgtgttttcatgcagttttggaaagttttacaaatagacttttaaaaaaatgtacgtaatgttttcatagaaaaggtagtggtttctttttcttatatccttccctgtataaaaataaaaatgtagcagttctttctttgcctatgtttcctctttccttcccccaatttgaccagacttgaaggacttagatatgtaacagtgttattttctataatttaggaacagcttttgacttaaaaagcagaagagaagttgaaaataatatagtaattctacatgtccttcctgcttcccaactctctgcacatgtttgtaacctcccctttcttttttagtgtatctctttcatatacctttgtccccagaaattctgattcagtagacttagaatggaattctgggcttttatattttgaaaagctccccacgggagttagatatgcacttcttattaagaatgaatgcttaatattggaatcaaaacacaataagctttctaactatgatgaataatccaacagatttaattatgattttctttttgtccagaaccaagactagatgttaattgccagagaaatagataagaatgcctatgacagcagtacattaatatgatatcaaagcttggaaattttattggtaatgaataattcagtacttaaaatatttagaagctatagaattaaaattaattaatgttgttcactgtgtgaataaagttgattgagattttacatttaattttgtaaacccagtgttatcttttccagctcagaaaacaccacatacaagctactactttctgttttgatcccttatttttctttcttatgctttatcactgaaaactctccttgagcaggccatgcactgtaaatatttctcctggttgcaaaaccttctcatacaaatgcagtagactgtgtaatgagctcttctttcacaaaattaaaaaaacctgaaagccctgatttgcgattctatacaaatgagatttagatctaacaattttaaattattgcttcactcttagctgttcaattctatctcttatttgggaaaccgaaataataaaaccattgctgattccacaattaggttgtaaaagtcaccgtagccatcagccatgaagcaaaagtgccaagatcaaaactacaaagcaaagaggctgagataaaaatgctgcagcattagtttatagcattataagcagcaataagaattccttgattgcttaacaaagactcaaaaggcatttactccattaccttacaactcaaagaggtattcctggaccagcagtattggcatttttttgaagtttgtaggaaatgcagaattttggtgcctccacggacctaatgcagcagaacttgcagtttagtaagatctccaggagatttgtatgcgcattaaagtctaggaagcaccgctatggtatacatctgatgtgtgcccatgcattttttaaaagtatgaagtaatagttgtaagtattggacactcttgaaggaacaaataagagccatggtctttactctctaaatacctccctgacatctatgttttaggcaaaatttttttcccatttcagtagtcactgatgcttgcacgatgcagtttattccaaaacaatggtgattctcatgtaatagttcatgttgccttaataatttacgttgcctcaagttctctgcccaggccccaatatacaccgagggctgtactcctcccctaacgcctgctctcatacagtggcatagagcccagttttatgctcttggtcacatcatggagattgcacaccacaggctttaacttctgccgtactctcactgcctctaaccctccatatgcctaagttctacgattctttaaattccaaattgacccagaagtctcctccgctcatccttttcactgagatcatccctcttctggcctaccatttgttgatcaccttgctttttttttatcctactgtatgtagtataacaaattatcacttgcaactgtgtcttattttttcaactagattatgtactgcctaagacctagaaaattgtgcttatttatttgaatctctaggaggatcagtaatgggtattaatactaatgactccatggtgatgatgagcctgaacttcctcccttcctttctttctacctctctcctttcctcccttcttttcttcctccattccttcctctcttcctccctccgcttcttccccacttcccttattcatagattcatgcgttcactcagcaaatgcttactgaaaccttccatgcatcagacattgtactaaacaataggaaactatcatgaataagacacaatatctgacctcaaagaatttatgatataaaagtaatggcataaaccgtgattacttttgcaccaacctaatatatagacacagtttgttatgactggtgtctctattactaagcaatgactgtcacatgcaacgctgatctgaacaggtggtaaagagtgagatgtaagcaatggagcaaagccaactagttacaaggaaatatcacatgtttactagagcacatctcatgggcattcaagagagtatggccaggacagcttgtgaatagttcagtaactgtgcatagttttatattcattgtgaggcaccgtgtcaccggtttgctgatttacagagtattttaattgctaactgtatgctaccaaaatttccagtattcgaaaataattttgcttgaatgtagaaaaagaaaaaagccaagaaatgtatgtgaaacgagagtctaagggagctttacctcagtctcagaaaacatgcattccttccttcatttaggaagcatgtactggggtctactgtcagcttgctattgtgtcaaggagtaggagaatacaaaaatattagagaatatgaatcacatctattaggagagttttctacatacgcacattattctgtcagtgacataaggatttgagtcattcagatttaaatacggtaggtacctcaagttctcagatattatttcattttctaaggttcgtatttagttaatatgttattttaatggccttacaaattctagattatcttttttaaaaagttaaatagaacgtaattgccatttttatttaatggtaaaaagcatttttgtttttgtgtgtacttggttgtaatattctccttttcaattgagctatttttctgatactttactcttaaaatttcattcaggaaaaaagtaaacaatatttaagcttgacaatcataaaaatgctctggtgactatagattattttaaaatttattactgtagcttagggatatcttgatgggatgctcctgaaagcaattaattctcagttttttgtggcttctaatgcaaaatacattgacgcagacagaatttgaaatgaattttcttctaatatagcaattaattttatttaaatatctctagagtttttttttaatactgtgactaacctatgtttgttctttttcacctctcgtatccacgatcactaagaaacccaaatactttgttcatgtttaaattttacaacatttcatagactattaaacatggaacatccttgtggggacaagaaatcgaatttgctcttgaaaaggtttccaactaattgatttgtaggacattataacatcctctagctgacaagcttacaaaaataaaaactggagctaaccgagagggtgcttttttccctgacacataaaaggtgtctttctgtcttgtatcctttggatatgggcatgtcagtttcatagggaaattttcacatggagcttttgtatttctttctttgccagtacaactgcatgtggtagcacactgtttaatcttttctcaaataaaaagacatggggcttcatttttgttttgcctttttggtatcttacaggaactccaggatggcattgggcagcggcaaactgttgtcagaacattgaatgcaactggggaagaaataattcagcaatcctcaaaaacagatgccagtattctacaggaaaaattgggaagcctgaatctgcggtggcaggaggtctgcaaacagctgtcagacagaaaaaagaggtagggcgacagatctaataggaatgaaaacattttagcagactttttaagctttctttagaagaatatttcatgagagattataagcagggtgaaaggcactaacattaaagaacctatcaaccattaatcaacagcagtaaagaaattttttatttctttttttcatatactaaaatatatacttgtggctagttagtggttttctgctattttaaacttgaagtttgctttaaaaatcacccatgattgcttaaaggtgaatatcttcaatatattttaacttcaacaagctgaatctcagttgtttttcaagaagattttagaaagcaattataaatgattgttttgtaggaaagacagatctttgcttagttttaaaaatagctatgaatatgactatgaagctaaaaaaagtgatagtgtcacttacctctagtttcaccacatttgtgaatacattcttgaaggggaacttgagccaaagaggtacaagtttaatggggaaaacaaaacctcaaaaaggttactgtcaaattcaatcatcatttaaatttcccttggaatgtattgaaggcacagaaagccaaatgcgtgctgctgcagttggaaagcctagagagtttataaatgggattttgtattatgcttccagttgttgatgttaatgtgtcttgtttcgtaaaggaagacttggcctttatttaccaaatgagactattgttatgaacaatgaaaacttcgttcttttgccaagctcttgcatcccacccatcatccacataataggtggattttaatattcaggaagctagaacaactcattgatgaatatctttcgttaagatgtattaaaaagaagattttggaattatgtcagttgtctttgcccacctcctctttccctctttattcatgttacattattcagaaagtagatacaattcatattttgtacaaaataaacacattagttgacctaaacacacacacacacacacacacacacacacacacacacacacacacacacacacacaccccttgccaaagttaaagaattatagcctcatcaaaagatattttgaataattaagtcttggttttgaaaatcttcttgattatagatagataaaataaagaactaaactttgtagttaaactacttccttaggtaagtcatatacttttttcccagattgaaattcttctcttaatcatacaagtattttattatttagataactgatgtgcttatactatgaacaggtataaacctgtataatgtcatttctgaactaggctcaatctaatccaaattaagatggtaagaaatgagaaaattaaaaaaattgaataccatactataaatatatatatacggagagaattcataaagtggattaaatcgactggaagattatttttctataatatataaagtattgtttcctattttaaatgtcttactcatatagtatttgaatagagtgtattaacattccctctgataactctaattcacctgaattttcaaaatcttgttatctgttattgggctctaaaggcacattataatttataaacaaagatgtagcaatatgcctgtttcaccaaataagctctaaaattttagatctttctaattttataagaaagtggtatatgctgactctgttgtgaaatagtatacaaattttaagttaattacagctagggatttggctgtaattaggaaaaaaattttcccatttaaacatgttgacctacattaaatattgcacttcagtgctttaaaaagtcaagttcagcttccttgagttttttttttaagctgagcttttaaagttgtctatttcacgctacattttaaaaataaatgttaacatatttaaatttccactgagaccacttttgtggcatacttcctcaggatttttatatcacttaaattttatgaaatgtaaaaatgtaataaaatataagtactggttctaccaatatactcatagctatttctaagcatccagtagcaaatcaagtaaaaattaataaaataatattttatgaataatatgttaacctaacaattaattatagaagggctgtaatcacgaacctattgctaatcaatagtgtactctcagtgcaacgcaagcagatgttagaagggaatagaagttatttattgcaccggtgaaaaatatataagatgcctattcaacttaacaacagtagtcttcgtttgtaatggactttaagtacagcggttagaaatatttaacattttttagtccagggacatcaatgaaagaaagtgtataaattcaagctagatgtctatatggagccctgtagttgcaaaactttaagtcttctgaaattttaagatattagaaataggaaaaaaaatctcaaaagttcaaataatagtggacatccaagaaggttagtctatgttggaagcaaatgaagtgtgaaatgtagtcagttagcgatgcagtttaagatagacaattcactacagcttcaattatgtaacagaagaactggatacatctataggcttaagcatgataataatgagtttaatgatggcgtagccaccaaaactgtctttgtacacgaaggaggtgcaaataaaaacctatcatcggctgtaaggggaagtcataggttgatacaaagcaagcctgtgtacaagtctttaagcaagcgtccatgaatagcaaggggcgccatgctcttcactggagaagaaaattacctatttgtctttactaacctctaactgaaattaagcattccttttcattttgaaagtaggcaaaaaaatcacagtagtacaatcagtacctatgaagtcacagatatgtacacatctcattacagttataataaatatatcaaaatatcatttatgcttatcactacttcaaaactgcagtacttattatatgtgctacagggtcttattgttgggctttaaaacattattctgaggaatgtcaggcttcaacagattgccaaagaagtccaaggcataaaaaaatgatcctagccagctgtctgtttatctgcccagaatctcatcctaatttactatggtttcagtcattttaatgtgcagtcactatcttcatacactccttttcttctggagtattctaggagaagacataccagtcgaggggttctggggagccaggccttcaagcaatggattgctgacaacataatgaagaggattttacttagaataatgtcagttgataaaagtttgaatgggagacggaagcaaggcagtgggaagtggaattcctaaattgaggaacctctgaatcataatccttagcaataataattaagatttcaaaacattataattctttcttcttttagacaagtctgatattgcttatcccatatcacagataaggcaattattctactaatatgcattaaggaatagtggttttaatttaagtgttaccttaatgaaaataattttgaattttttccttccccaagtctttttgtgaaaaatttcaaacatatagaaaaattgaaacaattgcaaaacatatgcccatttacactgttttcctccccctaaattcttagagtcaacaattgttaacattttgccatatatgctttttttctctcgctttctctaccctctttctgtatctctcatatatagggcatcacacacacacacacacacacacacacacactttttaacatttttgcaaataagttataaataccattatattttacccctaaataattcagcatgtgtcgctttgaaatacagacatgccatatataaccatgcctgtttattatgctctcctccaaattaaatataatactgcattattgttaatatccattccatattcatatttccttaatagttcaaaaatgtcttttatattttgcaggggagttagtaccaatatcttatcatggctcatgcattacatttggttattattatttttcatccttcttagtctaaaatagcccttccacatttttttcaccgatattgaaatttgaaaatgtccaggacgctagcctcaaaaaatgtctcatctttcaggatttgttttattttttttcccctgatgggatgatttaacttgttctgtagtctctgaatttctagtaaactggaagttaggtctaaataagacttcaagagatgcatgtcaaacatgtttggcgagaatacttcatatgagatgctgtgtattttgtattacgtcacatcaggaggtgcatcatatgaagtagtctcactaaatgctgcaaagttttattacttgcttcaggtggtgactgacagatcttgcattataatgtcacattttttcttcgcaattaataaatcatctaatggctttagtatccattgatgatccttccctaactcagttattacactggggcttgcaaaatggaggttttcctaatctgacatgatcttaacatttaccagctggctttcttctgtttgaaaaaaaaaaaaaaaaaaggtttttcctctatatttatgtcaaaatggactcataaatttttatttattcaatatattattatgaattacagttattattcttgcccagagcttcctgctcaattgtcccaggctcaccttggactttgcctatcccagatttagaattacccatttttttcaaggaactctggttacttttagaggtgaatagtacgtagaaacgtacatctgggtagtagccccttctcaatggaatgtgtgcacctttctggcaagcagtcccaaaggagataatattttcagattaccttggaaatgattcttgacaaatctctttcagaatacatggaagttaaaagtaagtctagacatgttaaaaagcccttcttgtgtgagacttcatgtacggtcattaagttactactcctttaaacctctctacttctgaattcttaaaccaaaatgtactagtatataatctatgctggtttgccatgcaaattaatggtgtaaataagataatgggaggcattcgtaaatgtacttaaaggaagaaattattgtttaaagaccttagctcattgtttgcatgcaaatacacgctgttgattagaaatgagccttatctaattcattaaagtaggcctggttggtcctcttcttgaaagtctccattagcaattcatattgctctatgcgcttccttgtaagacaactgttgtctcttaagttttctttaactttggcttcttacaaattcagaccccacccccaaccaaatagctttcaaccaaatagcttttcagcatcttatttcctacaaattaaaagcgaatattttaatgactcaaatggctctttacagtgtgtgcaatatgttaaatgtacccagtatatccgtgtgaaccagtgctacaagcctgctcacacattcacattttgcccccaggatctgtcccgtccgcttgctctgtactcaaacttcctttttttctcattgccagtttagaccttgactctccatccagcccagagtttggaaactgagtacccacaggctgaatcctgaatgcatgcagtatttttgcatagccactgtttttaaataattgacaacttttaaaaattgagagacctcattttttaaaaaaatatggatttctgtcttcttttgaaaatttagatctggctactaggcactcattactatattttctcttggcaccatcacctacaactgagtaacagatgtttcattttcttgctactcaaagtgtggtctctggtccagagcacagacatcacctgggagttgctaagaaatgcagaatctaataaataacagtcagcatttttaataagatttccaagtttccaagtgattcatgggcacattaaagtttgagaagcattgcctggggtaagcaagctttgtcctcagtttgcagcacctgtcccactttgctcatttatattaattgcttttccatagatatttgattttatagtacctcatgcagacctttgtatgatgatgacggttagggtggtgatggaagtgatggtgataacacttaatattgccatgcactgttccaagtgttttacgtagctcaatacttataacaactctatgaaatagttgctattctccttttaattttacaggagggcaacgaaggcacagactgataaaactctttgcccaagattgcacagccagcaagtatttgaaccaggatgcagtcccgcagtctgcctccggagtccttactctagatcagattttgcattatttatcccagttttgtccatcaggattctctggtatacacttgcaatttcttcctaccaaccttctccttacctttgatggccacacgtagtagcaaaagaattgaacatagaatctgttctgacctatctttccaaccctgtttttcataatttccactatttctgtttatgtctgaagctttgaatgacctgaagttttctgttcttcagcttttgcaaaaaaaaaaaaacaaagaacaaaaaacaagacaaaaaaaaaaaaaaaccgcttcctttggttgaattctctttccccttattttttttcccaaaatcttacacatcccttaagactcatcttaactgctattacctcaatgaattgtgacctgctcttctcaaacataagcagtttattctcttaaggttttcttgcccctttttataacactcatgtaatattgtatgtatatatcatgtatcatacctatttacatatgcttttcccccagcaagattaaaagcttcatgagggcagaggactctcttattgttatctctataacccacagtacttaccagaaagcctgatatattgtagatggccagtaagtactttcttaatttaaatcgtaagaattttattcacattcagattaaactgaagatttaaatctttacacttgacattattatatagattaaaaatagatctaaagagccagaccaatttttctgtttttatcatgttatcacatttccatggatacgtttgcaattctagaaattgaccttgatcccttctagtcttaaaaaaatggaaggagtttggttaataatattttaggtattcttcagaatttagtacatttaagagacaagtaacttcaatttatttagctagttatggcaaaaagcagctctttgattcaaacattttgtacatttgtttatcctactctcactgtatctcaactaataccttttaagtgaattaagcaggaattagccctgaaactgaatgttttagcctcatcctacatatagccacaagatgttttagatgcaatccatatcaccaaagagctatttttagattgatcagagagaatcatacagatattattattcacaggtgtcaatggaaaagctggtctcttcccatctgttctctgatgactcttgaaaagctttcaagggcattcataattcttcatcaaaagactatgaaaaatcagcttcatagttaattgttttatgtcatattttattttttcaacttggctagttctagtgaaacagactagctggcaccaaatatgttgttgcattggctggtaatgatgataccactgtgtggagatatacaagtgaatgtactttatttgtggccttccatgaactttatgtgcctgggaaagtaggagttagggagagtttgttagggaacgtgatctctgggatgggtcttaaaggatgagaagaggcaaatgaagagtaaatggacatgccagagagaaaaagtgacaggagcaaaatcactgaagcaagaaaaaatggcctacattgaaggactatacacagttcagtataaaaaggctctgttaagcaagcaccattgacttaccctaaactcttcattttctacatataaactgcccaattcccactccaaacctattgatggatattagtaacctattgatgtttttgaaaggtgttcaagtatcctttctggtaccatgtaccttggctcccaccatttgagagtatgttctccaagaggcaacagtctgtggttcctgacctggctatgcaagttattcttattattaaaattgtcctatttaattaaatatcatgaaaactaatgaaatagaaatgaaaagataagagaattgtggtttctatgaatactaaattgaatgctttggaagacttgataaaggtgattagaaaaaaaaaaaaggccagatgcggtggctcacacctataatcccagcactttgggaggccgagatgggtggatcacctgaggtcaggatttcgagaccagcctggccaacatggcgaaaccacatcgctactaagaaaatacaaaacttagccagacgtgggcctgtagtcccagctacatgggagtctgaggtgggagagttgctcgaacccgggaggcggaggttgcagtgagacaagatcatgccattgcactccagcctgggtgacagagtgaggaaaaaaaaaaaaaaaaaaaaaaccacggtgctgttgaattagatgtaggtaagacaactgtttaagattgggtatgagggatagaatccccaaaaaatggaggtattttgcattgagattattttcagcatctccaaatctgactgtaattcaaagaaaccaaactaaaagtcacagattatgaaatgtagaagtgttttatgcaaaaagtaatatgcttaacttcaacctgtgggcttttactccaggaaaagtctcggaccccataccaaatgagaagtaaatgagtgaccacttgtatattctaagaaaaataaaatgtttgaagatgtgtaaacacatttatataatccctccaattttacaatatttttccaaaaaccgcctatccacttaccctaatcaagtttgataaggggacttccttttatatgtaggaaggctgaaaaatgacgccatgacaaatgaaattgtcaagatggaccaggtcatggaagatttgaaatctcaaagaattttttccagggtagaatataaggatgttgggacgtttttatatgctttagatttgcatcctcatatgtccctttgacagttgagctcagagtgaaaaaaagagagtgaaactagtggcagggtgactcaagttagagacaatgagtaagcagaatagaactttaaaaacctgacagattcaagaaatacttgatgaaagtggaacaatttagtcgttaagtagatgggatgatgaggggaatgaagggacaattctaggatgatcccttttccaggttttttgcttgggggaactggctgcatggaaggctgttagtcaggataggaaatacaaaggagagtaactgaatggaaagaggaaagcaaatcagacatacagagctcaacttgggatataatagtcttaaggagctcttggaacattgaaaataaggtgatcagaaaacacgcatttgaataggtaagtctgaacatcaggaggaagacaagggctgaagacactgagccattttgctgtcaatgtagagatggtggcaatctccattgaactaactgcttctcaataaggtacctttctcaagtcattaatttgctaaccagtaaacaaaccagaattcccagagtacacattaaccattaagcactgctgtggaaaaggagttcaggtgtcaggaagccaacgtggcagatgagcactagtggtgacaaatgaaccaaagtgatatgggtgatctttatggggccacagagtaccactgtaaactatcacaaatcagaagggttgacaaacaaaatattggggataaatcagggaaaacctaccacaacatacaggaaaataagttcaaagatttcatcctacagattgcagataagaaatgagccctttttatttggggcaccctagggaaagagtagatgcccatatgtatatttaaagtatgaatacagcatttatttgaatatactgcaaatggtcaatacaagggtagctacagagcccataacatgaaaaggaaacacaaagaaatacatgccccagtcagactccttacttgggttgctgtaaattctctctccctttaaggttattgcatttaaagtctatctgttgattggacccaacagcagctgcaccaagactgtaccatttttaaaaaaaaaaaaaaaaaaaaaaaacaggccaaatggcattctgcatttattttccttgttgctgaagaaacttgaattgtctaccctcaaagcctgtcctttgagacacattttataattagaaacacttatttacaaagttctttttatgttagaatcacaaatcataacactccaaaaaaggaatacactatcctcaggtgagtgtcctacctttgtttacaaaagaaaacccaaagtcctaagagaaaaatgtgttgatcattttattgattccttaccttggtttaatatagttaatggatgtcttagatatgtataataagtctattatcatgttccctttaaaattctcttttgttttactaattatatgttgtcatagtttgaccattaatataagtctaaatttattataatgtgattttttctacaaaggttaatttgaattaaaatattttattttatctctctctactatgataaatgtttttaaaaatcgtttgtaaaatgaaagtactatatttgtgtaagctgccaatctaacaatttatcatttaccattatgatggtgaatgtataacaatccttatattcagcagaaagccttatctctcatttcagaggaatcttgccccggttaattattctgtctcttgaatgcacacaaacacaagcatatctttaccctttttctgctgcctcactatccctgatcaggtgaatgtttttagctcctagattacaatataaatatattcagacattcctttccaaatgcattcattccactgtacttgtcagagttcatagctgtgaataacagaacccagtttttgttgatagaagcggaaacggactttaggagaaagatacagacctgttcccattcctaaacaaagggatagaaaaccagctcaaaatgggcagaactcaaaaaagaggctcagctccaagaactatagtccaaatcataccctagattggatctcgaactcttggactcaagcgatccactcatcttagcctcccacagtgctgggattacaggcatgtgccacgacgtctggcccccatacactagatgtaaacgttgccatgcaccactctaccactgcagacactgggtgaagaatgtcattgctactggaaagaattctagatagtgccttataattctgtcactcattccagattcaaaaactgaacttcccccatcagattccatttgtatttggggattttgttcgacataatcagggcattcagattctgggcaaccaaagttaacaaatgtctcttacttcccctttcttgttattattcccatttgaatcttcttcatagttagtcactgttacttaaacacacattctctattatcacatttccctctcctctcttttgctgtttgcttttgatccaaaccactgctcagaaaccattattgccaataacaacaatgatttcttgtagttaaatccactggacatatcttagtcctattatccgtaggccatgtgccattaactgaacactttccgtattagcacttggtcctatcttatcttccaagtcactaatcttatctgaatttattcttacctctctatgtaattccttactatattgatgacactccttgctttacctgccccttacatcctgatgtttctctaggacatgttctgaaccctcccttcttctcattctatacggtttccctgattgttatccatagcaacaaatgtagctttcactgtatcaattagaataatatctagggagattaaaaaagaattatagtaactgaaacaaagtagaaatatattcatcttcttgtagaaggaatctgccagtaggtagtccgaggttggtatcattgctctatgatgttgaagatccagatcccttctgtctcacagatctgccatcctttggtgaggtccttacactcatggatcaagatgactatcagctctctatctatcacaactgcttttcaaaggctgcaaggtgtaggaagtggacaaaaaagggatacctctacccttttaaagggacttcatggaagatctacacaacactttagcttgtatgtcattggccagaatttattctcatgacaatgccaaactgcaatgggcattcaaaatgtagtggaatggatcatgggctaagcagctaagcagtctctaccaaagtcaccgatttcattttatggcctaagtctaatatttggcccaatatatagtttcagattagacctacatatgtagcttcaaatggaccatttcctcttctatgtctcaaagccatctcaaagtcagtatatccaaaactcaacatgttatattcctctcccaaaatctactgtgggtgatatcactatctattcatgtacccaaactataaatttggaagttacaagagctagtattaatgacactaagttttgtgcatttactctatgaacaggactttgataagagttttacaaatgtttcccacttaattgtcgcaatatctcagttatagagattttatacgtccatcatctcacctgactcttcgagatcataagcaaagcatggcagcattcttatgtccattttacaaattaccacattaagcacaagaaaaaacaagatatatgtccaaggctaaccaaagttatagaaggatcgagaactaaaagtcagtgatttagacccagatctgtgccttttcccttattgttacatatgaccatatctagctatgtgaacaaagcagctaatagtgacgacagggtagaacaaataagaaagtgaatattccccactacatttatgattatttgccagtttaacagcttcaagcctgtgtcttctcagatatgtgcttcctcttatgtctaaggaaaagtactatatttgatatgcttttatgaactttcttttttgagatggggttctggctctgtcactcaggctggaatgcagtggcatgatcacagttcactgcagccttgatctcccaggttcaagcgatcctccaacctcagcctcctgagtagctgggaccacagacacgggctactacacccagctatttcttttttttttttttttttttggtagaggcaggatttcactgtgttgcccacctggtctcaaactcctgaggtcaagtgatccacccacctcagcctcccaaagtgcggggattacaggcatgagccaatgtgattggcctgaattttttaaatttaattttattgaggtaaaatatacctctatataaataaaagtaaatatacctttaccatttttaagtatacagttcagtggtaataagtaaatttatgttatttttcccctttgtcccctctccctactcctatttctgatctctggtaaccaccaaggtagtgtctactttcatgagatccatgtttttagctcccacatgtgagtgacaacacataatatttgtctttctgtgcctggtttaccttacttaaaataattacctccagttctatccacgttgctgcaaatgacaggatttcaccctttgtatggctgaataatatcccatggtgcatatatatatatcacattttctttatccattcatcctataaattttaaatggtgtggaatttggagaatacttaaggaaaaatgacgattgtgtaaaaggaaagtatctacaaaagcaaggtttatctaccccataaagataacaagagaatctgtgaatgtggatacggtttctggagtgtttcagaggttgaaagattgtgaagaactggatgggtataaaaaaaagtgaggaggagaagaaatgaaagttctggaatgttctgtaaattgtagatgagttccctatattaattttaaaatgtaaattgagattataattattttttgatgatctatttttgctgggctgattctctgttggtgtaactctttaacgaatatgggtcacgtgggaccctggattttattagaattacatgtgcgaatcaaattctaactttatgagccaatataatgattgtttttttaatgattagagtctatccatgacaaaaacagcttgtttctcctactgacttatttggtgttttcttgctaattagcctttatactaggcagtagtaaatcagagtacttggacttcaggttggccattacataaacctggcaactaaatgctgggtaataatcacctatcttcccacctgtgtttattacctttggaagtatgtaacatggtatctttgcgtttatatttttaatttgttcttttttctcttgcaccagctacttaaattatctgagcttccttttactaatccaaaaataaagataatagtacatatttatagagatgttgtaagagtaagaggtaatgtaaataaattggctagctctatgcccagcacatgagtaggtgcttagaagttagtgtctgggtacatgacttctggggatgataaagtgagtagctcgataaatctccccaagaatcagtaaaatgggacacactggagaaaacatcttatgaccctggatatcaaccaacggcatatgctaaattaaaaagtgattatttataaaaagtactaaactttgtatatgaacaatatgaatttgtggtgtatttgcctgtattgcccccagtccccactcccagcttggtcaagcataatagttctatcaaggtagaacaagccatggaaataagcagcttcatcaccacagggactgattttatttgaagcagaagtttaaaactccatgtccagaagcattgtcagtaacggtggagacctaggcggcaaacaaaaaggcagaatagcaactcagctggcctaaagttgcagtcttgattggaacaagtaactgactggcagactggccagaaatttaatttaaccagcatatctgcaaaatgaggcagccgtaataggcctcagtaaggactccttgtgtctccttcatgaaaacttaaaatgtgcctgcatgttgaatataccctttaacacatataaagaacctttagcaaaacttggaagtcttactggcttgaggtatttaagatcaactgctggccaactattgactaatgcaaattaagctatgcttacctctaggaaactaggcatacagtttgtttctgttgtttgacagagaaagaatatcaacagccacacactgtggggaaacagattccacagatttcatctaggcaagttattaaaacttcaatttaaaaaacgctgggcataagaaggaacatcagaatttggggctcctttaatatgttatttaaaatgtcaaattttcaagaaaaatttacgatacgttcaactgtgacccattctcatggggaaaagcagtcaacaaaagttgtctctgaattggcccaggtattggcagatagagacttaaaggctcctactataaataccttcaaacaactgaagaaaagcatgtttaaataattaaatgaaagtatggtaacaataactacaaatagagaatctcaactaaaagatacacactatataaaagaaccaaatgaaaattctagaattggaaagtagaataaccaaaatttaaaaaaatcactaatggggctcaagagcagatagtaagacagaaaaaaaaaaaaatcagtaaatttgaaaatagataaataaaaattatccaatctgaatgtcagaggtaaaacagtataaaaaacgaacatgagtcatagctttgtgtcaaaacattgagcatatcaatgtagatgttacaagagttccagaaaaaaagagaatgttgttaaagaggcagaaaaattatttgaagaaataatggccaaacacttcacaaatacggttaagctcaacaaaccccaaatagaataaacacgaagagatcaataccctaaaacataagagtcaaactattgaaatagtttcatttgaaattattgaaagacaaatgggaaagtctttaaaacaaccagaaaaaaatgactcctcatgtacagggatcacatgattgatagttaatttctcatcataaacaatagaggccagaggtattgaaatgacatattcagagttctcagagaacacaaaattgccaaccaagaattccgcataaaacaaaactatccttcaaaaatataggtaaaataaatatattaccaagttgagaatgagaatatttcttgctagctgacctgacttacaagaaaaaactaaataaagtcattcaggctgaaaagaagtgatattcagtaactcgaacccaaatgaagagataaagaatcacagaactgataaatatgtagatacatataaaagactgtacaaatatagatatatgtttttcttcttttaacttctttaaaagacctaagattgcataaaaattataacattgtgttattgtgtttataagcaggaggagcaaaaatggagcttagcagagaaaaatatctaaattttactgtgttaaattagtttgaacttaagtaaattatgatcaattaagatgcatatgtaatctttagagcaagcactaagaaaataaatagttaaaaacaaaatttaaaattacacactaaaaataactaacaagacagtgcagtaaaggagaaacaggaacaaaaaagacatgaataagatgtgaaaaaatacaatatggcacatgtaattgcaactaaaagttgagaattcccattaaaaaaatctgaaatttgaaatgctctaaaatgtgaaactttctgaaggttgatataataccacaagtggaaaatttcacacctgacctgtaatgagtcacagtcaaaacacagccaaaactttgtttcatgcaaaaaattatttaagatactttataaaattacctccaggttatatgtataagatatctattaagatatatatatatacatatatatatatatacatatatatatatatacacatatatatatatatatatgtatatatatagtatgtgtgtttaaacttaggtcctatctccaagatattaggtatatgcaaatattacaaaatctaaagaaatccaaaatccaaaacacttccaatcccaagcattttggatatgggatactcaacctacatatcaatagttatagtaaatgggagtgaactaagcattccaattataggcagagatttcagacaggattatttaaaatatccaaccatagtttgtttaaaagagaaatgtattagagccaaaaccatataatttcaaagaaaaaagaggtactatgcaaattgtttacatataaaaaatgaagtgacaatactaatgtcagacaaaatagactttatgacaaaatatgtaacaagagaaaaagacatttttaattatataaggggtcaattaagcagaaaatataacaattataaacgtatataattaataggaaagtcccaaattctatgatgcagaaattgacagaattcaaaggagaactagacaattcaacaattattattggagacttcaaaccctactctcaatagctggcaggccaattagacagaaaaatagcaacaatatagaagaattcaccaacactatcaaccagcttgacctaactaacatttataggagacgccaccaaatgaaagcagaatacatattattttaaagtgcacatgaaattttctctgggatagattctatgctaggtcaaaaaacaaatctcaatacactcaacaggcttgaattcataaaaattatgttctcttaatatgtcagaattaaattggaattcaacagaaggaaatttggaagatatcaaaatattttgaaattcaacaacttctaaatccattggttaaaaactaaatcacataggaaattataaaatattttgaactgaataaaaataaaagcacaacatgtcaagatttataggatgtaactaaagcagtgcttacagggaaacttctagttttaaatacctattttagaaaagaataaaattcttaaatcattaactcaagctttcgccataagaaactagaaaaagaagaacacagtaagctcgaaggaagcataaggaaggaaataacgggggttagagcagaagtcaataaaatagaagaagaagaaagaaaaatcaatgaaaccatacattaatctttgaaaatattttttacatggagaagctttagctagactgaccaaaaaaaaaagaattaccaaaatcataaaggaaaaaggggtaattactaccaaccctacagaaattagaaagactagaatgtaataacatgaacaacattgtcaacaatttctgcaaaacatattaaatgaaaaaattcttagaaagacataaattaacaaaactgattcaagaaaaaaatagacatatgaatagacctaacacaaacacagaaactgaattagtaatttaaaattttccaacaaaaaaacccaggtccaggagaaagataggaatccgaggcatccacagtatagaagaagaaatgaaactctctttattcacagacaatacaatcctgtatgtagaaaaatctgatatccacaaaataactgctagatctgataagttcatgaagcttgcaagataatcaatatacaagaataaattacattcctgtgtactagcaataaaaaattgaaaatgatactaagaaaataatttcattctttgtagcataaaatagattaaatggtcataaatttgaaaatataagtactaaacctgtactctgaaaactgtaatacattgctgagagaaattaaaaatctaaataaatgggaccatattccatgttcatgaattggaagactcaatactgataaggtagtgattctccccaacttgttctatagatttaatgcaatctccatcgacatcttagcagatgttggcacaaattgaaaaattgcacaatcttggcacaaattgaaaaattgatcccacaatttatatatagcaattcaaatgtaccaaatagccaaaacaattgtgaaaaagaagaaaaaagttagaggactttgaaatcaggacattacctgatttcaaatcttgatgtaaatctgcaatgatgaagacagtgtggtactgtcataaggacaggcttatagatcacctgtaggtttaggaaacaaacctattcatatttttttcttaaatctactaactgcactcctaatgttgacaatggaagagactcgatagtccagcaataaactcttatatttatggtcaatcaatatatgacaaaggtgacaagataatccaatagaagaaaagcttattattgggtagcttattgttagtgtacagaaacagagctgattgttaatacaactcaacaggaaaaaggcaaataacttgatttttaaaatatttaaatatatatttctccaaagaagacatagaaatggccaacaggtatgtgaaaaggtgctcagcatcactagtcatcagggaaatgcaaatcaaaacctctgtgagatgaacactatcatctcacccctgttaggatggctactataaaaacaaaccaaaaacaagagataagaaatgttgttgaggatgtgaggaaatcggaacgctagtacaccataggtggtaatggaaaaatgatgcagctgctatagaacacagtagaaaggttcttgaaaaagttaaaaatagaactaccatatgatccagcaacctcactcctgggtatatatcccaaagaattaaaaccagaatctcaaaaagatatctgcactctcatcttctctgaagcattattcacagtagccaagatatcaatacagcatagctgtgcatggaagaatgcatggataaagaaaatgtggtgtattcatacagggaatattatttggccttaaaagggaaggacgtcctgccatatttgacaatatgtatgaacctggaaggcattatgctaagtgaaataagccagtcaccaaagggcaaatactgaatgattccatttatatgaggtgtctgagacagtcaaactcgtagaaccagagagtagaatgatagtaaccaggggctgggcgaagggggaactgggagttgctgttcaatgagtataaagtttcagttatataatgtaaataagttctaaagatctgctgtacaacatagtgcctgtactgtgcacttaaattattattaagaggatatgtcttaagtgttcctaccataagaagaagaagaagaaggagaaggagaaagtgaagaagaagaaagaaaaaatgaagggggcatgagcaaacttttggagttgatgcatatacttggttaccttgattatggggatggtttcatggttgtatgcttatatcccaattcatcacattgtatacagatgctcctcaccttaggatgggattgtgtcctgataaacccatcataaattgaaaatgttatgagtcaaaagtacattttcaattaatgatattttcaacttacagtgagtatatccagatataaccccatcctcagtccaggattatactaaatgtgtatcgcttttgcaccatggtgaacttcaaaattgtaagtcaaaccatcgtagtcagtcggggaagatctgtttgttaattatggacccatcgtgtacaccttaaatacttaataaagctgttaaatgaaaattaaaagttgactgggcacatggctcatgcctgtcatctcagtgctttgggaggccaaggcaagaggattgcttgaggccaggagttcaagaccagcttgggcacatagcaacattccatctctacataaaattaaaaatgtagccgactgtggtgatgcaagcctgtagtcctagatgctcgggaggctgagttgggagaatttcttgagcccaggagttggaggttacagtgagctataatcatgctaccacaccccaggagaccctgtctcaaaataaataaatagaagctttaaaaaatattggtatctcagtgttcctcattatccactgtatttaaggtttagctacttgtgcttgatgcttgacaaggtaatcttacttttctccctgatattggtatgatgcaaatttactatatatatgacacaaatttatatatgcaatattttctcgttaatggccttttattttactctcattttcattatgctttgccttttaagtcatatagcaaataaattatgtggcattttcttagcaactattaattcaggagaatgggaacagaattctctcatagattcagctggaaggtaatgatggtcagctcccagtggagaaaaaaaaaaaaactcccttcagttttcgtaaacatacagagaaattttctcctaagtgctatgtcagtctgctgtatgtcctattgatctgagaaccagaaaacacatattttagtttacactgccttgactctattgtacatggctaggtctgtttaaaaaagaaatccttgaagataccctttggattctagtattttaaaacggatgcttagctaagtgaagtggtctacttcaaggatcaaaaccaatcttgagtaatctgttaggtagactccctaagttcatctgtaccttgtaccaaatttttaatgaatttagtaattgacatggatgtaaaataaataatacactaataaagttcatgcagaatcaaattttaatgcccagaggtaatgtagaagatattacctgtccatttctctggacttagctcctgcaactctccatttttctctctaaactttagccacactgaattcctagtttcaattcctctgactcgctaagtatttcttctaccttgataaaagctaattcctttgtcttgtaccatctgtattccggctgatattgacatagttttcagggctcaatttcaatgttacttactcagagggactcactgttacaaccaccacagccttttcaatctaagtaagatccactgctcttcttagaaacaggttatattccaaatgactgtaagtgcttttgttcttagaacatatgtctccattcaaaagaccgatagatattcagttaagccctttgagaaaattataaatgttgaggaccttgattattattgttattattgcttcttttctatgttttcccaggactctcaacaaatttgctttgcttttgtactcatggcacataatgagattaataatgtttagaaaacatttcaaaaatacacacagaggagacacatcttagtctaaagttagacatgataccaaaaactataataactatagctgaccagtgaccccatttattcatggaaagtaaaatttgatgcatatttgcctttaggagcaacatacctatgaaagttctgaaagtgaaagtttgtaaaaaaggagtactctcctaacaatcttaatttttttctatatatatgtatggtttgcattaaactcttttgtatgattagtggtttaatgttgatgtcacccatgacaccataagctacgtgtatggactggctctgttttgttcactcctgaatatccagcaaaaatagtatagtgcctggcccttggtagatgtgtaataaatgtttggtgaatgcatagctacacttcaatgcttatcgcattttaatcccagctactcggaggctgaggcaggagaatcgtttgaacccaggaggtggaggttgctgtgagccaagatcgcgccactgcaccccagcctgggtgacagagcgagactccatctcaaaaaataaaaacaataaaaaaaaggagacccattcatgtatctgtatcactgactagcctgtcaacattttgttaactacctcatcaagtagcaaaatcagtacctggtatgtggtagatgctcaaatatttgttgataaaatacagtaagttaatgacaggcgagcttgcctcagtgaaatataatctgtaagtgagcagtgtgtatatcatttgaaggtgccctacttagcctagcatatcacagagattcccagtaaatatttaggcagttcattaactctaaaagttgaccctcatagtcattggcctacattattcacctccctctgtctctaataaattcattggcaaatttctgaactccaactggaatgtttgtggtggatttcttcatacctaatggattatttcaattttcattttacattgtattatttacttgtctgaggtctttataatgacaaactcggcatgcatgataagctgtcattacttatgccagttgacaaggacatattatttttctacaaaaaaaattatcttggccaggcgcggtgcctcacgcctgtaatcccagcactctgggaggccgaggcgggcggatcacgaggtcaagagatcgagaccatcctggtgaacatggtgaaaccctgtctctgttaaaaatacaaaaaaaaaaaaaaaaaagcagaacaaaacaaaacaaacaaacaggagtggtggcgggcgcctgtagtcccagctactcgggaggctgaagcagaagaattgctcgaacccgggaggcagaggttgcagtgagccgagatcgcaccactgcactccagccgggcgacagagtgagactccgtctcaaaaaaaaaaaaaaaagtggtaattgttcaaaatatttacttattaattcattttaaaattgcatgttgaaataaaaaataaatgtttagtttttaaactatctcttctacaacagaaacaatatagtgagaagagtgatcttgttttacatttttgcaaatctctttaaaagttagcttaagagaaggcagctggttcttatatctgtttctgcattgaatgtgctgtcatatctcgcatcatgtagcctctgaaaaactcataatagaatgagagaggaaaaagtcaaataacatcttagtattattacgaaaataatttggacctcacagaaccactgcatgggtctcagggactcccaggggtccccagaccacatttaaggaaatactgtttcagggaatataactatttttgtacctcctgtggctatattcttttaaagaatagtaacctctgtttctgaggaacttagctgcaattatgtgcagagtttaaataagtgaaacggaaataccctttgcctttctgctcgagtatgaaagtgatgatcaaaatgttcccttttctctctctctctctctctctctctctctctctctctctctctctctctcactctctggggaacttcgggtttccgtctctatataatgtattcatattccactggaaacatacatagtttgagaaaacagatgacattttttctgggggtggaaagaattactaccacgaggaattcaaaatacagacacagtaataaaaatcaccataaagcccagaggggaaaaaaattgagtaacaaaataggaggtgaaattataaaactgagtaacaaaaaagaggtgaaattataaaataaatgataaagttggttgtgggttaggaagaaagagaaatataaagaaactggcataatgtaaaagccaagacaagaaaagtgaggcagaggcataggtcttttgactattttccatgtttgattctaaggtaagtagatatagtttctcatagttggaaatgttcgtgaatttaaacagaattaatgtttataatcagatgcaatgtctagtttttctatttgtcctgtgaaataataattgtgtaaagtgctcatgattgtttcaaggggtgaggagtagttctaattatcatagatattttcatgacttcgcataccactggtttatagagattatacagattttcttatatcagaactctcgtatctttaattccctagtagatgtctaagaaggagatttatcacatagcagatggtggtaaacttgagtaaagtgccagatactaaatgcctttggctttgtgggccattcaatctttgctgcaactactcaactctgctattgtagcatgaaagtaaccatagacaatatgtaaatgaatgagtgtagctctgttccagtaaaactttatttacaaaaacaggtggtgagcacaacttggttcatgagccatagtttacaaacacttgctgtatagctttccctggttgaatttcgttaattttatacagaacctgcctcccatacacacacactttgttcttcatggaaaatctccccagactactatgaaataatgttattacttggagatatacaattaagatgatgtcattaggagattattaatataggaactaagcaaatactatatgctaagtactgaggatagggtgcgatcacaatagatagaaaatctgcaatagtttgatgaacatgggaaattacagtatttcctgtgatggaaacattatgaggggctgtgggactacataacaggacctgtgacctatacctgggttggggatgtctaattaatcaaggaaagctttgtagaggaagtgatgtctaacctgagattggaaaggtcaacctggagctacctagatgaagatgtatggaaggacatcccaggcagagggaacattgtatgatgaatcctgatatggatatagtgctggattttaaggaagagtaagttgttccatgaactatacagtgcaaagaaagatgaagaaatagaagtagagaccagatcacaaagggctttttgaccatgttagagaagttatattttatcccattggcactaggatgttgttgagtatatgaggacatgatcagcaacatattttagaaagatctcttattctgaagtgtaaagagtggataagaaggagacaaggtaggaggcacgagctaattagaaagcagtctcagagaggctgttagaaatcagaacagaatggctattattaaaaagtcaaaaaacaacagatgatggtgaggcttcagagaaaagggaatgcttatacactgtttatgggaatgtaaatgagtttaggcactgtggagagcagtttgaaaatttctcaaagaacttaaaagagagctgccattcaacccagcaatctcattacttggtatatatttaaaagaacacgaatctttctaccaaagagacacatgtactcacatgttcgtcgcagcactatacagtaacaaagacatggaatcaacctaggtgcccaccagtggtggattgaatgaaataaacgtggtatacatgcaccatggaatactacacagtcataaaaagcatacagtcacgccttttgtaggaacatggatgcagctggaggtcattatcctaagtgaattaatgcaggaacagaaaaccgaagatagttagaagctaaacattgggtactcattataaaggtgaaaacaatagacattggggactactagaagggggaggaaggagaggggcaagggttgaaaaactacctatcgggtactatgctcactacctgtgtgtggtgggatcatttttaccctaaaccttggcatcacacaacatactcaggtaacaaacctgtacgtatactacctggatcaaaaataaaagttgaaatcagaatgagaaggagcgaaggagacagcgacaggaggatggagagaagtgggcagattcaagagagatttctcaagtggacttatgaggacatgcttattgatacgctctgggagtgagggagagagaagaatcaaggatgacttctacactttcagcttaaaaaaccgggagctggtggagtcatccattgaacttgacagaggagcacgtttaggcaggaagatgatggtgtttgaatgtctgcgaagggaaaaactgaactgggattcaaatcagaaaaaacggtttgaagtcataccctcttaattgcattttctatcggatggtaatggctttgtgacaggctttactgataggtgatgtaactctgcctctgacagatgaagatccaaagcatcctcagattttcccgaagcctgtttcagcaactgtgtagacagcacacacaaaaatctggggggaagtcctagggctcagttagttgattggatctattaaagtagcattggagaacacagttcagtctgagatttcccaaacatattgctctataatttatttttacccagaaactgaattcgatgtgggatagggattataaaagccttcagattccagatagaatctctgaatagaaggcttttgggccacatctagtaatctcctttcctcactccatttctgaacttcttgttcacttcttcgctgtttttaggacgttcttactacactcctgcctcaaggcctttgtacttgttttctctgcttagggcgttctttcccgcaatatttgcatggcctcctccctcgcttctttatttctatattacctatctttattaaagctgctataaaaaaaaaaaagcccacacctcagtggcttaacataatagaaactttccgttcatgcaaactttacaaaaattttctggtcaacaagtagatttcctccaaatggtggatcaggggggcccagggcacttcgcttttgtggctctgatgtctttaacatacggatttcaaaatcactgtgctcttgtacataagaatgaaaaagaacaaggaatattacatatgtggtggtggttattggaggtggggttatgagccaggcttcatattcatgagcatcacttttgctcacactccattggctcgaactcagtcatgtagccaaactaatggcaagggagactgggaaatgacagctagctgcacaattaagagaaatgagtagacttgtctaatgagcagctagccagtccctaccacgaggactttgctcaaatgtctccttctccatggaaccttctatgatcaccctttataaaatcacaactgctccccatcttcccctcaatatttccatcccttttccatgcttcatttttttcctctgtaacacttactgtatcacaatctatagattttatttctttatcttgtttactgtctgcctccccttcctcccaatcggatgtaaggtccatgaggcagggattgctgccgatattcacggccatatcaatggacactagtagaccctcaataaatggctgttgcattgtgattacatatatgcttcacctagaagtagtctcatctggtggcacatttactcatagattgacattaattctctattgttttttccccagcaaaatttgtcaaggtagtttgtcagtagggagaaataaagttgtcaggtggctcatcaaaagttcaattttgagtactcctcctgtgtactcataatgttttataaatacttttatctatgtaagcacgtgggcttagacacaattctaggattaaaacagaaagctctgtatccatattttcccttttttgtacctccttttatgttctctaccattttttttgagtgctgttagtgaagcactaggctaaatcttgggtttctgcaaaaaaaactttaatcctcacaacactctaaaatgtttattgttctaattttaagacgaggaaactgagggctaaagagattaaggaactcgcccgtgttcacgtactcagctgataactggcagcatttagatttggacttactttccatacagatattcgcattgctaaccttcaggtttttccctcatcgttttccacatctactcaaaagttgctaatcatttccttaatagtgaggcataaatgactgagaaatcttgatatattatccccctcaggagcacttcattccgacaagacacaaactttagggaaaatgaacaaatgtctacttgtacaactcaagcaccaaccaggtatggtagacatgttggcttaaaaataaagttgatgcttgggttctgattctgataatgacctacggagggtatggcctgaggaggttactaggtgtgtgtagaaatcaatgttttgttttggttttccctcgggaagggtcaacttatacttgaatccttctgaagtttctcaaattacaagatggtcatttattttacttcaatcaaaacaacaaagtactgtccgggaaagatgtattgccttgacttattctcaatttatgcttattttggaggcttgtagaagtaaacctgatagaggagggcaaaaacacacacacacagacacacacacactgggagaaaataaatttaacacagtttagggattgactttggttgtatgacatcacaattgcaagagttggatgccattgtaaacaagctatggaaagaatactgttaaaagtaactcattaagtggttacatggtgtagctcatggacatatggcacagaaaaaagataaagctgtctttacataacataaaactgtattctgttatgtaaatgtgtgcttgtggcttgcagtaaaattcctagtgaaacattacctctagattcagcagtactatacctcaggccacatggatgtaagtaaagatgatgccctctggaaaactgagttaggcaacaacaagtgcatccatgaggatgcaaatttcaatgttgaaggtgcctgtgaagaatttgaacaaaattgttgcatgaaatatgaatgaagaagtgtgatctaatgacataatattttgtactatataattttaaagtagtacacacaatcaaattaatgaattaaacattatatgtaaacaggtgatcattgtatctccattttctaaagtttctatgttaaaggtgatcaaaaaacttggagagagggacttctcatttggaaaatgggatagtcacctttgggtatgtgatgtatcaatctctagaacttcagtttcttcattgaaagcatataaaaggcaatccaaaggatgtatggaatattaaaagattccactgtgaaactatctagcactttacctgaaacacttgttagatcccctcaccaaaatcatgccatgtgatttggcagtctattcctcttagcgtaagagtagcccgacagaaaatgttcattaagagttaatgttaaattcattgaatttagcaacacatgagtagcgcttcctttctgattatgcaaatctctcaccatcgtaatacgtgcttcctttaatttcattgggaacatttgtaatgtaaatggtaacagagccaatatttcaaacagaagccattctttctaaaaaaagctaaatgtctaaatgtattgaaatgcttctaaaagtaaaatatttagcacttatttgcagatgggtaatgttaaatatctcactcattattattactaccacttgtctgaataaatcctcccataagcattaagcaagtaggtaaacaaagaaataacacttcatgtgatgaatgccaatatgaagcacgtttaaactgttctgtcaagagacaagcctggaaatgctaactgtgtttctttgcttttctgcaatcatctgaatacataaattcaaattgcagcttttaaaacttcaaatcgaggcttttgaaatttcagaaaacacatgcgcttggaaaagcagattataacaaggtcccaacgggattttgtcaccatcttttttatatttcaaagtataaaaaaaatctagataagaaatgactaccaaatgttttcatatttaaaagatgctgtttttttaaaaaattaaatcactggaaaaaaagttttccacaaatatcgtgtaaaaagaaagacagcaaaaagcttagccaaagcttttactgtttaagtgatgatttattctgagagttcttaagagttttctaaattagtatatggttaatatccataaaatcatatgcaagatgctgtctttcaaattgatgctgaaggttaattataaaatgtacttaattatttatagtgtcccattgagtcccagatactctgtgtccaagaacactgtaaatacagaaagtttagcagaattatattggaaaggcagtaattcttcacaaattaacttattgatataatgcaatcccatttaaaaattttcagcgagaattgttttataatttgactgaatgatacattacataagttagaataactaaagtgggagagcgggttaacctaccagaaattaaacatattttaaagctgcaataattgacatagtgcattactgtcacaaaaatctacagtagatcaacaagcagaaacttaaaatatcatgaagaaagcaccataaatcaattcagaagagatggtgctgggggaaaaaatatcagtttctgaaaaactcttcaaggttagaaacaacactatataaatttaagatggattaaatatttggttgttcttttttaacaaatgaaagagtaaaggatcaagaataaatgagaatatctgaacaatggtaaaatggccacaattttaaggatactatcaatgaacataatatcaaagaaataaactgttaaattttatttagaaaaaactactaaaaggcaaaaaggaagctggaaacgtagtctcaattaatctatgtttcagataatgtgaaaagagctcttaaaaataggaaaacacaggaaaaatgggcaacagacattgccgataattgacagtggaaactaaataaatgacaaacatgtacacacatacaacattttcaactttcctattagtagaatacttaaaatatctatggcaagctttttatttgttttattggtatatcaattataatgctcaatagtggcaaaagtgtagtgagacaagtattttgtaactgttggtgggagtttacgagtgttctgagtaccaaccttgacagaaattcaacaatgtgtatctaaatccttaggattcccattgttaacttttcattctcattccagcagatacatgattcaaaatgtataaataaatgtgtttattgtagggttattcattataataaaaaatgaaagcaaacaaaattcctaataacacaataatggtgaaatatagggtacccctatatatcttattactaggatcttaaaaaatcaagtttttaaagcgtaattaatgacctacagagacacatagtagaataataaatgaagaaaataagcatacaatatagggtttgaacccagtaatacatataaatctcaactatgatgaataagcacaacatctctcctctgtactggatattcttgatagaaaaaaatatgctagtaaataatttgagacatatttgaaaagaggggagtgtttgatttagaattttctaaacttgagggttattattatttttttggtttgatattactttttcctgctccttaaatttttgtttgtttggggggtttggggttttcttttccttaaacgtgtctgcttctagatgaaagttgaaaatgtttaaaagccttgccaatgtgtctaggtttttcaaatgtaatcagattttagcaagattttacttaactaaaagtattcagaacactgtgcaaaatcatctggagtcaaatagtaatggaggcaatgatttgcagagtagaaacagagagagagaaaaagatgagatagaccctcaaaatctagacccaaggaattaaatctgcttggaacatttaaacaaataaaggatgcctgtactatactagacgttttcttcttccacaattgattctaaggtcagaatctgaggggaaatggtgctgttccacattctaaaacaaactgccagcaatcgagaccagccacttccccatagggtttactctaaagcaacagggattattatctctattccaagcaatttccaatctcctctgtactccgtgtcccaggcaagattaaaaagactcaggtaggaaggggtagtaagctttgtggggagtgcagtttgtggtaagggacagttccttctctttcatctctctgagtcagaagtagagacttcgagagaatcactgagagtaagtatgtagactccaagaaggaaaaagcatcctctcacttcaatgaatgtttggaatctgcagacctccttcccaggtctgtgtagcttttggagaggccagaagagcaccgtaggcattcctttggctttccatggccaagcacatagagtagaagaagaggaggaaccgtaaggttaaccatacataagaaatcaacaaaaggctttgaaattgacttttcctatttttcaatttaaataagagagaattgtcaatgattaaaattcataaaacgaagaaagaatggactcagaaaatagcaaacatgaaatgttaattattagttcaaaagttagtttaccgtgttttctctgccaactgattgctaatgactaaagtccttatttccagctttcctctctccccgagctccagatctcttgatttattaaactagtagtttccccaaaatatatgagacaacaaaatatactctcagctgaagtaaatagcattcatcttcccagtcagataaggcagaagtacttctagatcagatgttatattcgggataggttaaaaacagaccctgctcccagtgtcccaggaatgaacagtggatgtgcttatttctcattgcatgcgtgtatcaaaatatctcacgtaccctacaagtacatacacttactatgtccctacaaaaattaaaaacaataaatcataaacatttgtaaaaataagcgaataaatgtataaatgaatttaaaagagaatagacagaggggagaatgtaactttacgtgtcccagaacagactttgaacaggctcttatcatataggaaaactgaatgaatatatgcaagcataagtccaataaccagattctgatttacagaatgatcgcaactgtagttctctcaaggccctgtctttgaacaggctgtgtcttattcctgcaacatgctgatctatcttcatgcttcaagactcagatcattatcttctctgggatgtctcccaagcactgccccagaaataacttctcctcctataatacttaatcataatccttggcttacatgcttgtttcttctcattgactatgaaatcctcaagacaaggtatataacgtatatatctttaatcctaatgcccaattgagctcttagaaggtagtaagctcccaatacacatttgttaatttgaagcaaaaaaaaaaaaatagctaatcattcaaaaaactgaattatcacaaatgtccatctaaagtactatatttacacaattaaatgctatacagccaggttaatgaacagactaaaattatatgcaacatggattatcgtaaacataattttgaatgaaaaaggcgagacacaaaggagtataaagccatacaattccattttcataatattcagtaccggcaaaataatcaaagttgacagggtactggttatacttggaggcagtgactgcaaagggataagaggagatttctgagattctgataatattctatttccttctctggttgtacagtgtgttcaatttttaaaacactattgggctatacagttaaattgtgcagtgtcctgtacgtatattacacttcagttaaaagcttccatggaagctacacatagttcccaaaagacaacaaaacaaaaaattttcaattattttaagcacaaacaattttgttcagctgtcttacaatcgaatatgtaagaataaatttatggctaattagcatagagttatatgcattttcataattaaaacttccacgagtacaacatatgttaagtattttaaatcagtttttctctttcctcaaataaggttgtgagtcataattcggaaaacagtttagcatgtaataatttagtgttttattttaaaccaagctgaagccacataaagcagaactgctcaactgagccctatccaaatccttgacccacagaataagaagcagataaaatggctgctacttaaacaaaacaaaaaccttgtttatatttttgtcctctcattttccataagtatactttaattaaacattttaaaacttgtaactttaggttatatacttactttagttggttctcaaccagggacaattttgtccccacccccaaccccccagcatatttggcagtgccttgaaacatatttggttgtcacagctcaggggcgaggtgttactactggtatccagtgtgttcaacaggccagggatactgctaaataccctacaatgcagaggatagctgctcacagcaaagaattttccaaacctaaatgttagtaatgctaaagttgagaaaccttgctcagatataatgacataatgttgttagaatttttattttattcattttaatgtatgtatgtatgtatgtatgtacgtacgtatgtatgtatgtatttgagatggagtctttctctgttgcccggggtggagtgcagtggcacgatctcggcttactgcagcctctgccttccacgttcaagtgattctcctgcctcagcctccctagtagctgggattacaggcgcctgccaccaaacctggcaaatttttgtatttttagtgtagacggggtttcaccatatttgccaggctggtcgcaaactcctgacctcaagtgatccgcccacatcggcctccctaagcgctagggttacaggcatgagccactgcgcctggccaggaatttttgaatcagaatttttcttgttcgattttaatctcttatcatttagagattcttgaaatattgaaattactttgttcaaagtgaatgaattttcttaaattatgtatggttaacatcttttaaattgcttatttttaaattgccatgtttgtgtcccagtttgcattaacaaatagtttgagaactatgttggaaaaaaaaataacaattttattcttctttctccaggctagaagaacaaaagaatatcttgtcagaatttcaaagagatttaaatgaatttgttttatggttggaggaagcagataacattgctagtatcccacttgaacctggaaaagagcagcaactaaaagaaaagcttgagcaagtcaaggtaattttattttctcaaatcccccagggcctgcttgcataaagaagtatatgaatctattttttaattcaatcattggttttctgcccattaggttattcatagttccttgctaaagtgtttttctcacaactttatttcttcttaaccctgcagttctgaaccagtgcacataagaacatatgtatatatgtgtgtgtgtgtatttatatatacacacacacatattgcatctatacatctacacatatagatgtatagattcaatatgtctaaatgtatataattcacagtttttatctttgatttgaaattaattttagattttacttgagaacttcacaacttcatataattttaaaaactgaagaccagattgtggaatcataaaatctaaatctaaatgggaatcacttttttaatctgtcctggttacctacctggagatttgagaagagtctttaaaaagaagaatccattttcttagggaagatctggattgccagatcagtctcaccacttcagcctctacttaaaggcattatattcccccgaagcaatgttttgttttagctgatttgtctgggggtgtgggacgtggtgttggttcacattccatttggttgaatagacatccagcttattccagtggcttttcataccgtcctactgtgatgtctgcttattactgattacttcccttggctgactgacatgctctgattgtgcaattggattaactttcatggttttagttttaggaaagcagctcttttggatctatttcattttagttgtcaagcagaaggtgaaaggggaagagaaattaatatttaatcattccctgttatgtgccaagtattagatacatttacagccactattttatttaatcttcatatcagattttgacaatggttgctattatcctcattttacacggtcacataatcaaagggaaatgaaattggtcctttatcaatgattcaggtgctttacacatgtaaattagagtccaatgtcaaacgtttatttctgtgaaacaagaggtttacacctgaacaagaaataaagtataaaaataaaatatggcgtaattcaataaacaaatatggagcactgactatacatccgatgttttactaggtatttgggattcaaaaatagaaaagagtgggaatcatttgaagatggttataccctagaacaatgaactcagtcttttcttggaaatttatctttcccaaatgtattgagtgtcatatatagtaatataattgataattcattcgaaacatatttagtggcattttcttattaattaatatgcatgagtctattttctcctgaaagaatctagatcagtgctttcaaatagaactcccgtgatgatgaaaatattctgcatcatccatttttgtaacgactagctatttgtgccttttgaatacctggagagttggtcgtgtgactgaggaacttgagattttattttagtgaattttgattaacttgaatgttaatagcgttgtatggctaatgggtactgtagcagacacagtaactttagttgacaaaaatgaagtgttaacaccatggtgattttggaggtcttgggaaagggcatacactatgtggtggtgaatgagttcgagaaatttagggatatgaagtaaaaaatgaggactccagaatgaaactacccaaatttgaaccacacctttgttgcttgctagatttgtgtcctgggagctggtatttaacccctttgtctcagtttccttccatataaaatgaagataattggatctacctgatataattattataatatgaagataaactaagataataaatgtgaaaaggttagcacagtgcctggcactgtgtatattgagagtcaatactctcaatgtcagttacctcttaagatgataatgcaatttctcagcagcaagctacggtatgctatggcatgctatgatacccaagaggctgatgaatttgttcacattgttctatttctgatagagagataggttttcagacactaactttatttggagtgttgctttaccatctcacatttttctcttaaaaaatttatgagggataatataatcgtttattttctacagagatttatctactgagggggtgagtgtttcagtcaatcagctctgtgctcagatagaaaactgttggtatttgaggtaccactgggccctcggtcaagtcgcttcattttgatagactaatcaatagaagcaaagacaaggtagttggaattgtgctgtaattcattttaaacgttgttgcatttgtctgtttcagttactggtggaagagttgcccctgcgccagggaattctcaaacaattaaatgaaactggaggacccgtgcttgtaagtgctcccataagcccagaagagcaagataaacttgaaaataagctcaagcagacaaatctccagtggataaaggttagacattaaccatctcttccgtcacatgtgttaaatgttgcaagtatttgtatgtattttgtttcctgggtgcttcattggtcggggaggaggctggtatgtggattgttgttttgttttgtttttttaacctgaccgtttgctttggctatatgttttgttgtggctagaaaaaatgatgatggtgaatggctttacattaatgaccaaatgccaaaatttataccacaattttttgcataaattattctgaagaatcagactgaagaaatggcgaagtatttaattcagtggccaggcatgtactgacagtatttaagctgaaaggacgtggtctggttctagttaaacaagtgtcataaatcaaaattaattattcacacctgtggtatggacttaataattaatgtacactaacgttcgccacaagtttatttatttacttacctactgatttattaacttgtgagttttcatctttccaccttgcatactatataaatctaacagtaatactatttattaaattaatacatatttattttatataaagcaagtggtacatatgaatttatagtaaaaagcaacatcaattgatccagcactattcattcaaagacaatcatttccccactgtattttcatggcatctttgtcataaatcaagagaacttgtatgtatgaatctgcttctggattctgtatcctcttccatttgattaaatctgtactttaacaacagtacttcactggcttaattacaatcttttttttaaaacaatcctaccgagctataattcacataccattaaactcatttaaagtgaacaattcaatcgtatttcggtgttacttttttaaggtgtgataaaatatataacataaaaaattgtcattttagtcatttcgtgtgtccagctcagtggcatttattacaaccatcaccacagtttatgccccacccccaatttttttttttcttttttggagacagagtctcgctgtgtcgctcaggctggagtgcagtggcgcgatctcggctcactgcaacttccgcctcccaggttcaagtggttctcctgcctcagcctccctagtagctgggattacaggcacctgccagcatgcccagctaagtttttgtatttttagtagagatggggttttgccatgttggccaggctggtctcaaactcctgacctcaggtgatccgcccaccttggactcccaaagtcctgggattacagcgtgagccaccgcgcccagcctccaaaattttttattactccaaccagacagtctgtaaccattaagcaatagttcccctttctctctcttcccatccgctagtagcctctggactactttctgtttctatgaatttggctattctagatcttttatataattggaattatatatttgccactttgtgtctgccttacttccctcagcataatattttcaaggttcatctatgttgtagcatgtgtcagaacttcattcctttttatgactgaataatattccattgtatgtatatacgcaatcattttatttaaacattttggatctggttgtgtaaaccttccactttgttcttcctattcaagattgccttggctacttttggttctttgaataaattttagaactatattgtctatttttacataaagccttccaggatattgattgaaattttgtgaatctggagctcagtcaacatctttacgatactgagtcatctaatttgtgaacattttgaattgtgtcaggttatttattgtattttttaaattggtgatgctgacattctaataacagatcatttacacgactgataaaatatttaggaactaaaataagtaccaattttatgacattaaaaccataatgtgcgcttaagtgtctctatttcaagcaggtagttatttgaaaaaaaaaaatcccttcttggtttctacctttaatgattgcaaaacatctgtgtaaagatacagacttttatgtatggagggaaggtggtgtcccagcaattaaattttatagctacataacaatacaaatgaaatcatccctcataaaaagagaacaaggaggaaggatacccaaaatgttctacaatatctcagtacatcttatgacaaaaagaagaacaaaaattataattgtaggaaatgtgagagaactatctaaaatatacaatagcagctttgtgggttgtgaaagagtcaaggttttatgtgtcctgcaacagaataaaaagtcaaatttttatgatagaaaattaaaactgaggttacgaacaccatcatgtatagacttatattactacagcatccataatatctgtttcctatgccaaaattataattttaatgcaatgtctttgccattaaatgccacaggatttggaattttattcattagtcatattaaaattatttaatcatcttttctccatccatatgcctctgtatccctgttagtttagatttagggatagaaagcaaatgatcagtaccagatttaggtaaataacacaagtttttttaaaagtaaaagaaaatggcttataacactggcagacagtcttgatcttcattaaatctcaagctcttacttattacaggagggtagaaataaagcggaccccctccctgtgtcctccagccctacccttcatccaaaggttagagtgggtgatataattggaactagtgggtcatagttactgtgacatgaatatgtcaattccttagtacatagtatctccaaacatatcctaatatcataatcagttggcaggtgactttctccacagctaactctaatatgctgcattctgcgtattgagccaactgaccccttactcttgtacctttattttatttttttttttatttattttttgagacagagtctcgctttgtcatccaggctgcagtgcagtggcacgatctcagctcactgcaacctccacctcccgggttcaagtgattcttctgcctcagcctctcgagtagctgggactacaggcgcgcaccaccacacccaactaatttttgtatttttagtagagatggagggttcgccatgtcggccaggctggtctcgaactcctgacctcatgatctgctcacctcagcctccgaaagtgcggggattacaggtgtgagccaccgcgcccggcctgtacatttatatttcattactgaagagagaaaacagcaggtgaagataatatagctatttctttaagggagtggtggacagggttgctttaaactgaatatagccattagcgtaaatttatgggtagcttcatgcaatgaaggctcatgaaatgatatcctcattcttgtctaatacataacttgaccttttacagcctttaacaatgatacccgtaagagccacaaagtggggatgttattaaagctagcctctgtgttcctctctctgatcatctcattctatgatcttcacccacacttctgactcaggtgtttttaatatttatccctcttcatatttctttgtattttctctgaacatgcatgtgggtgtaggaggctctctcgccatcatcatcactctcttcctctgtgtttctcacttttaggctaattttcatctatgaattgacacgtatattataggaatttatttttatatatttattaggaatcttctttttgttttttttttttttttgagacagagttttgctctgtcgcccaggctggagtgcaatggcacgatctccactcactgcaacctctgtctcctgggttcaagcgattctcctgcctcagcttcccgagtagctgggattacaggcatgcaccaccacgcctggctaatttttgtattttaagtagagacggggtttcaccacgttgatcaggctggtcttaaactcccgacctcaggtgatctgcccacctcggcctcccaaattgctgatattacaggcgtgagccaccgcacctggccatgaatctacttttctatttgcatatttgccactctttttctgccccagttgtttatgtaacacattctcttctgctctccttccctgaccccgttaatcccagtttcatctctttcatgtctttttattttgtgtcccctttcctcattcttcattgctctttgtatatgttatatgtgggtatttttttaactacccatttatttaaaaccaaaatatgctttatcattctttatttttgaacaccgagtcctagaaaggttatgtgacttatttgagaccatgtagctttctatttaaatataaaagtgattccaaaataaacagtaggggttttaaccttttggtgaagctcaagtgatttttatgtggataatatcctaatattaaaatggggatttattttcttttaaaaaaactatatgagtttttgctttggtttttgccctttttgagaactagatgctgtgttttaaaattactttctagaaccttctctgctgtggaacatttacagttgtgtaatatagcaaaacatgtttatgttgtttcagaattagttaaaatcctactatttttaatgtcaagtaattttacaggtggtgtacgttatgcattcctattagttttaataaatatgttgtcattttgttaaataagtttaaatttttcatcgcattttacatgtaaacagtaatttactatctacacataaaataccatttacaaataagatatactgtttatatgtaaatggtaaattactatttgaatttgttactgcccagacagtataaaatggtgcacataaagaaaaaagcattttggaaaacaattaagaaatttggctggaaagtgaattttagttaagtgcatcttattcactttaccgaggaaaaaggtaggtttacaaatacaacatatataacaaacctttaatatgggaataatttttgtaatattgataataatacaggtattattttcaaaaaatcaccaaataaaaattatgaaagtaaaaatacagtgcaactcctagcacaaactatcttccacaatatacagttggctgtatctaaatttccagaaatctggttcattttgtattaatctctaatcatgttgcttctaaatatgtatctgaggagtaaacatttcagatttattttcatttgtataaggtaaatgaatgtttagtctttttccagacgtatttgctatgtaatgacagtcattattagtcgtcagtataaatgtgaatagcaaaaaggagaaaattaaataaagctagagcttggctttccgactccttgctcaaaaatggacactttgtccaatcaatttcctatcacaagatgacgattaatagattgttctaatagttaccattcagtcctgcccttaacgtgatgttttttcaaccaaataatagaatcttcactggcattgttaccatattgactggtatttatggaaccccggaaaaaaaaatgctgtaaaatatatagtaggaagtataataatcattataggaaatcatttctctagctggaagtcttagcagggaccagatagttccactggagcttttatgtgctcatgattttctcccttgaagtgtatttgtaacacagttcacacagtttttaattttataaatctgtgtgctaaaacgctattatataagaaaacgggccgggtgtggtggctcacgcctgtaatcccagcactttgggaggcccaggcgggcagatcacaaggtcaggagatcgagaccatcccagccaacatggcaaaactccgtctctattaaaaatacaaaaattagctgagcgtggtggcatgtgtctgtaatcccagctatttgggaggctgaggcaggagaatcacttgaaccagggagtaggaggttgcagtgagccaagatcatgccgctatactccagcctggcgacagagcaagactctatctcaaaaaaaaaaaaaaaaaaaaaagggtgttcacctatttattgggcatatagtctgatagttcccagaaacccattatcttgaatgttttctttatgtaagttcctggaaatccattatttggatgttttctttatgtagttaataattacagcaaagctgtaattaaattatttattcaagagctatctattaaaggactactatgtgccacattctgttctaagcatatcataatcacttcccacccttcccttatttaaaggacatgcataattttatagggcttggcattataaatattcatatctctaatttatagttgctaaacagtttgaagctgagggttgggggaagggagtagtaatttaaagtttataacataagcatccttgactttgcctcctataatttcacactgacatgaggtttattactaggttgtgtgtcatgagtacatctcaatttgctctgactgttctggtttttgcctgttatcctatcataatttttaatagctccctctttcattgtcataagtattccactttagaagataaaatatatagagagggtcactctagttatgagaacaaacatcaggcttttagagctaggcttggtccagtgctcaataactattattatcatgattgcttttgttcttagtagcatcatcgtccttgtcatcatcatctaccttcctaatactttagttcagctgagaatttcggcctatccaagaaatctgattgccattattaccgaattaatcactctttaatgacaatagtatataagaatacgtgacatttaactttccaaattattgaaatgttacgctgtgtatggaaaattctttctaaccgtgttttttctctactctcaaatcgtaacaatcgtcaacacagaagaagacttttatgaccaaatttgtggaatttttttccccatacaccaaacagcaggcaccagctgggtgtctctaattcagtcctgacactatccacccagagatagtgtcagatcccatagattgagggctcagtaccgaggtctgcctcctctgcacccccctagcgcacgcgcgcgcacacacacacacacacacacacacacacaccagtctcaagtccaggcctctggaacttctgacccatgggcttcaagttggggttcccatgaccctctctttgggttcaactaacttgctggagcagctcacagaactcaggaaaacactcgctttcacctgtttatgataaaggatattgcaaaggacacagatgaagagatgcatagggtgaggtatggttggggtggagggacggaaaggggcatggagcttccatgccctccctgagtgcaccaccctctaggaatccccacctgttcagctacccggaagctcactggactctgtcctctttgttttttatggaagcttcatgacatcagcattccttccccaagggtatatggtgggaccctctaacaggaggtttttaagacctataatctgaaaggcgagggaacattaaagtgaaaggagagcaggagaaggtcagaggcctgcccctgagacccaacgcaaccaacattataacaaaaaactgtaacaagggctatgggtgttatgagccaggaacctggatagaaaccagtatgtactataataccatataggcaatgccaagaatatggatcagacactttacaaacaaggaaaaagtaaacaggagtgatgaggaggtaatttactgcaggcattaatgatgagattatgaattatggattccacttgctaccagctatgtgatcttatacctactctgtccatacctaagttataacatccataaaattcaaatactaaaagaagacacttccccaggttgtggtgaaaattcaatgaggtagtaaatgggaaatgtgtaacacagtatctggcatattgtaattgctcaaaaaatgttagattaaaaacagtaggagtaatactaaaatagaaaaatgcaaagagcaagcacaaaatcatctctgattctcacctccaaattctccaaaagtctcaccttcttaatcaaagttgtaaatatggctcttggggagaaagctgaactatgtgctactattatgaatgcaacaggtgaaggagaggagagttagaggcagcaagacaaccaaatggctctcgtggaaggcacagaggattttcagccactgctctcctattccgctgatattactttcattttctatgaccaactagcatttcagctaaaatgtgttggaaaatgatagatttttctcctcctattgcctaagaagcccaacaaagccagcattgttttcaaacaccagcattctcacttttaaagtatgaacataattcagaggacttttaattctgaacatcgtttttatcaatctattggcctgattgtaacccagaaatccaagcagaaagcaagtaaactttcacactgcttccccatcccttccccctacctttatttttgacatcagtttccctcattttggcaaagtaaaggaaaagcatttgtagaaggttacactgaagctagataattttctattaggaaacctcaccaaatacaagataatttgttcattccaatataataatgttttaaaaaatataacaaaaatccagcataaattgtgaagcactgatacttgtgtaacaactaatttccatagtgaaacttcattgttgccactatctacatactgaaaatgtatatcaagcatgtaaatgtgtcacttaagtatgctgtgccctagattttatttaaaagttaagctaattttcaactaaaaacaaattcgactattcttagcaatctctcctccccgttcatgatggatttaaaatgatgaagagtataaatgatgatgaaaagagaaaggaggagaaaaatttcataactctgcatcttcagtgtagcatttttaagtaactcctttattagcacaaaggtgtttgcctgaagcaatgacttctagaaaggagaagaaatgacataataaaaggggattttgctaatataaaatgttttttctttccttttgtttctgcaatgcttttacttacatagcaccaaccctgagactagagggagtttccttcctttctaataatttaataatcgtgaaatgatattaaatggaagttttcatatgccaactccttaaactgaggttaaataaggaacaaagattaaaggccatatttaagaccacatattgtaaattctaacccagtttcatttattatatcacctgcaaagccaatatgccatacaaaagtaaaataacagggtgatttttattaaagatcagaatcataccaaaaatgaacttttctgtcaaatctttatactcatacatcaagatgtgagtttatttatgtagctaaaataacttaatactaaatgctgactactatattcatgtcagctgacccctagtgcttcaaaccatagaaaagggataccaaatgctgggttggttgtgtattccatttttgccgtataccacctgccaaggcttataacagatctgtaatgggtttcttaccttttattgtgtagaaaatggattgttggattaggcctggggccagtgaaccatggaaccccaggtttgcaagaaagagtttatcaccctttgatgttatttctgtctcgtgtcagctgagaaggatgagctagattatctgaaagtaagctggatgccaaaatcagcattcccctcatttatccaccttatggttcggggcaagaccactgtatgggtaacaaaagggctgataagggcctgatggagaaatttggtttttctcccttttgattggcttgctgatattagaaccaattacaagacattgacgagagcatttcattgtttgttgctagagaaaatccatcaattttgttgtggaaatgaaagcatttgagctgaatgttgcacttataatttgtgaacattttcagttatcaccgggacaagtatagtccatctttggcatggttggccaagtgtggtgggaaaagagatggaccagcaaatgggccggaaaccaaagtcatcaaaagggtatttcaagaaaactctatttgttctgatggttacattctgcaggcaacctgtgactgatgactgatgcttatacctcaaatgcagtctaaaaatatttttttgtgaaagtgacacattctgactgtgatgtgggtgacatcaacagttttgaataggacagtacttcttggacttattgaaacttttataaaagaatgaacattctgaactcaattgcaatgtaaatgactatcatgaagattgcttctgttggtgctatgacttttgtgacaaattttagaccattgcagttatctcctagaggttgctttattgttttattttcatcagtgatgtgtattttatcagtgatgttagaatcactgagctgctggttaaggaagagaaaaaaattaatattcaggtgctatataggcccttattcattgagaacaaataaaggccaacacacaaaacaggaaaattaatagaaaagacactctatgggtaagatttcatatagtttgggagcagacaaaaactattttaattactaaaataattaagaaagatgttgaggctgggcacggtggctcacgcctgtaatcccagcactttgggaggccaaggagggcaggccacttgaggtcagagttcaagaccagcctggccaacattgtcaaaccctgtctctactaaaaatacaaaaattagctgggcgtggtggcacatgacttgaatcacagctacttgggaggctgaggcaggagaatcatttgaacccaggaggcggaggttgcagtgaaaggagatcacgccactgcattccagcctgggcaaccgagtgagactctgtctcaaacaaacaaaaaaaaaaagattaaaaaaaaagatgttgacattaacatgttcaagtctttatgctgaaactagaatgcagtatgattaaataatcatttctacttcgggtgaaggattagttttcttaaagatacccctttccagcttctcagttcgcgtgtggttaattcccaacgtggcctcaaatattctaatggtttgtgtaatgagtgccaccgttccaccttcttattctccatgcctcatctcagtcctggaaagatcactaaacttgcagttcataactcagtctagacccaggttcaacactcactaactcataactgtgggccacttatttaaatctcttagtgcctctagttcctcatttgtccaacagtgatgcattatgaagcatgtttgcccatctcccagcgtctagtgaggaactaaaaacacaatatatactatcatactttattacgaggagttaaattgtggttactattacaaagtaggttaccataaaattctaatagcagtggtaaggggtaaagatccacgtgccatcacgtagagcagaacttctcaaactttaatgtacggcaggtccttgaataatgttgtttcattgagcatcactgtgttataatattggcaagggaaaaaactgtatctcagctaggggggcactgtctatgtggggttttcttttgtctctgtgggttttcttctagtactctggtttcctcacatgtcccaaactgtgcacgttaggggaattggtgtgtctacattgtccccatgtgagtgtttatgtgtctacgactgtgccctgcgatagaatggcatccctgccagtgttggctcctgtctggtgctctgagttgccaggatgggctctggcctcccaagtccctgaactggaatacgtggcttggaaaatgaatgactgaattaatataaattactgtgaaataaaaattcatatagtattcaataatcataaagatgcgtgacaataattgatgctctacagaagtgctcagtgagctgccatattgattattgtttgtttttgaactttgtggtgagagaaggcaatcctggcagtttatgctttgcaaacatttattccttgaatgaaccaccgccactgcaaacactgtcactcactgattcaccaaaaactgggtaaataattttcctcctggtttttattaatctttctaaagtggatgtatatctcacatttatttctgagtttaatattagaagtgcttggggtctttatttagatgttggatcatgttttgtgaacacaggtatgcagtaggaacttaattcttgtttatcaattagcctatggtaagattggtttcattatatgtcattttgcctaagtcacagtttcccagaatctatcaacaacattaattgatgacttactgaaacaggaatcaccttgagatcttgttaaaatcaggttactgattcaatggctcttgcataggacctgaggttctgcatttccccccctaatttcaagatgctggttccctggtccccttgctctacttcttaaatggtagggaggtagagagtggctatcaagagtctgtgtaggagttgaccaccaatcccattcaatggaatgcatacagtgtgttctgagatactggaaaggcctttgcaaaaagattttgtctcttgatatttatgaagcacattcatccgaccacagaagatacatatcaactttgacagaaaatatgaacacattcaaatgatttatacctttgaaacatagatcgttgtggggttcataacccaagtataactttcccacagattcactcaatttccttcctctttctgtgcaatatattgtatattgcaagaagctcacctccactcaccttattcctcaggctttcttctcaactatcttctgtatagatttaaccagtgggaggcgttggcaggagattggagagcaggagaaggggagatttcagggtatttctttccctctttcactgctttgggcaacagctgatacagagtaagtggccaaaaaatactagctattattaggtcttctaataatgatcttctaaaatcactttttcagtggttacccccattgatttgccatgaatgtctcttcagacatctttgcaaagaattgagcctgactttagatactcattcaaaatcaaaatcagtaattttaggattgaggactctggtattatttaagaactcttaactgtaccaagcctcactcccatttctggctttcccctatatatcagttaagtaataactccaatagtgtaaaatttgcaatagtgttatgtaacaaatcaccctaaaacttattgacttaaaattatcaccatttataattgcacacagtctgtggggtcccgtgagctgttgtgttgttctggctcactcatacattttcagtcagctaatgggtgggctaggggctggcttatctagcataagcgcagctaggatgattcacctctgctccatatggtctctcatccttcggcaagcgctcctgggcttattctcatgcaagaaacaggattctaatagagaaggaaacaagacttcttgaagcttaagcttggagctggctcactcatttctaacacatttttttaaccaaagcaaatcacaaggcaggcccatattcagggattagggaaataggttacaactcctgatggtagcaactttaaaagtcacattgcaaaaagatgtgcatacagagaggtcaccagtgcaatctaccacaccttgcaatctattaagtttctcaccccctcacaagtaaggtattcagttaagatgcattcctatgtattcagatttctaatcaactaatcctgattctcacgtaatattgacacagtatcaatattctcaaaagccaatagtctagagggtcacaaagatcctcaaagatactttatgcaaaatcctaggagtatagaaacagtaccttggtttatgtatacattcagtatttattaagtgtttccaatatggtataatgttaaggaatgaggatagagttatgaacagacagacacttgtctttatggatcttacatttggagggggacaaacattaaaatggattatataattacaaatgcagccgttctcattgtcttttcagatttctcagggtgtagactgagctactataataaaaataccccaagtttccatgtttcaaacaatatagatatgtgtatctttcccacataaagtccagcctaggtacgtagtctctgctctaaaaaggaacacaggctagcaaggcagctatactattctcaatataatactgcatttcaaaatctccatgctggtcccacaaatatccatgcactctctttcttatcatcaagagaacacacagtgccttcccaagagagaccagtcaaagtctcattcacttactgcatccagctaaaagtccattgtctgtggatgatgcactgtcttctccatcagatcaagatatggttcctcatggtccagtgacctataaagtgaaagttatgctatctgctcctaccacaaccaattctctctttttaaaatttttttaaatttttgtgggtacatagtaggtgtatgtatttatggggtacttgagatgttttgacacaagcatgcaatgcataataatcacatcatggagaacgggggatccaccccctccagcattaatcttttgtgttacaaacaatccaattatactcttatttatttttaaatgtgcagttacattattttgacgatagtcaccctgttgtgctatcgaatactgggtattattcatttttcctaagtattttttgtacccattaaccatcccgctgccccctccccgactcctccactatccttcccagcctctggcaactacctttctactctctatgtccatgagttccattgttttgatttttagattctgcaaataagtgagaacatgagatgtttttctgtgcttggcttattttgcttaagataatgacctccatttccatccatgttgttgcaaatgacaggatctcaatcttttctatggcagaatagtactccatttgtgtatatgtaccacgttttctttatccattcatttgttgatggacacttaaattttttccaaaccttggctattgtgaatagagctgcaataaacatgggaatgcagatatttcgtcaatatactgatttcctttctttgggtatatacccagcagtgggattgctggatcatagggaagctctatttttacttttttgaggaacctccaaactgttctctatagtggttgtactaatttatattcctaccaacagtgtgcaaggttttccttttctccacattctctccagcccaggcacaaagacagcagtaagtgctggacgaccacctatgcaagacctagactataaatccagtacttctctccctctccacacccccatacccaccactccattctgagttttcaaatgtaagctaagctaaatgattcaataaagctttttgaagtcaaggatgagaaaaatcgttgctttttatgtaatcccaccatcaaagtaataattgcttagttcaaattgtggtgatgcaaacaaggaaagcaagagagcataaaacgggtggatctgacgcagtccagaagtggaggcaatggttgtttttagataattattagagaagatactgtgatttggtttgaaggcaaagctcactgaagttctctagttctagatacacctatcgaaaaattcttacccaaataaatgtctcagtgataagagcagcctttccccaaatgcctaagtgtttttgttttgtttttgttttgttttgttttgttttgttttgtttttgtttttgttttttttcaaaatcttcctctggaatggatgctgaccttgtcattgacttattcttcaccacaactcagtcatattaatcttgaaagagacagagaggccactatctctgctaataatttacataattgtttttctacaatttggtgctaattaaaatgtgaaaggggtagtgatgatataggtaaatgtaataaggtcattctttgttcctgagagcaaagataatgtcaccagaaaggattgtctgtatattcacataagagcaggaaacaggaagagagacacagtaaggtaaaatagcatactagtatatcacgtagtctggtatagccaatgtagaatatttatttcaaaaaacaaataaagataaagttctgcttcactttgagaagctgttttttttaatcctgtatagttagttcgacatgttactactctgcctggttcaaattttgatttcactctgttccagttatatatgctatgcaacaaaccactctaaaagttactggcttaaaataagatagttttacgatttctcataattctgagagttgactatgatattcatctgcttcacctgatatcaaccaagacactgggaaagctggaaagtccaaaatggcctcactcacatgactggcagttggtgctgcctaccagctgagaactcagctaaagctattggccatgagcctcagtttgtttccattgtcttctccatgtgtctcctttggcttccccacagcttggtggttgagttctgtgaagaagccttccaaaagaacaagcaccaatcttcaaagacttatcaagcttctgtttgtatcacacttgctactatcccattggccaaagccaggcatatggccaagttcagaatcaaaatgagaagggactacacaaaggcatgaatccaagaggcgtgattaattgtggggctgccaaataatcgccttccacaaattccttactagctgtgtcatctctctgtggtctcagttttctcacctggaaacaggaacaaaaatggccctacaaaaatggactgagatatattaggttggtgcaaaagaaattgcagtttgggaccgtgaattttaaatcattataactaggctcaagcacatctttattaatcaaagtaggaaccgttacagtcaacacatttttgccaagaagaaataagtgtgtttattcctgtagcataaaaattcatgctttgggattcaatgaactcttggaaagcattttcttcatcctgctagttgtggaagcattttccctgtaaaaagttgtcgagatgcttgaagaagtggtagtcagttggttgagaggtcaggtaaatatggcagatgaggcaaaacttcctagcccgattcattcaacttgtgaagcgttggttgtgcgacgtgcggtcgggcgttgtcacagagaagaattgggccctttctgttgaccactgctggctgcaggcatggcagtttttgatgtatctcatcaatttactgagcatacttctcaaatgtagtggtttcgccgggattcagaaagcggtagtgggtcaggccagcaggagaccagtgaacagtgaccatgacttttggtacaagtttggctttggaaagtgctttggagcttcttctcagtccagccactgaactgggcatcgccagttgtcgtttaaaatccactttttgttgcacgttacaatccgatcaagaaatggtttgttgttgttggcgtagaataagagaagatggcacttcaaaatgacgatacttttattttcgctctgcttatgaggcacccacttatcgagttttttcgcctttccaatttgcttcaaatgctgaacaactgtgaaatggttgacattgagttcctcggcaacttctcgtgtagttgtaagaggatcagcttcgatgattggtctcaatcggtcattgtcaacttctgatggccagccactacgcccctcatcttcaagactcttatctcctttgaaaaacttcttgaaccaccactgcactgtgcgtttgttagcagtaacttggccaaatgtgtttttgacattgcgagttgcctctgcttctttacaatccattttgaactcgaataagaaaaacgctcgaatttgctttttgtctaacatcatttccatagtctaaaataaacataaaataaacagcaagtaataagtcattagcaaaaaaaaaaaaagtgagaaatgctcattaaaatgatgtataacataatcacatttatttaagaatgtatttcaatatcaaatggcaagttccatgaatgtgaaaacaacacttacttttgtagtcacctaatgacacatttaagaagctgaaacctgagctcagcacatggtaagacatcagtaagtattagttatcataatttttttagtaattttcctacagagctataaataaaatgaaatactttccaaacagtgataaaactataaagcagcaatacattataagcttctatcctaatctgccttcccctcagggccttaaaatgtgtcatttctgtaaatgttacctctgacatgaaagcaccaacacactgttcagcaattacaagttgattgtgacaagagcctcactctccctatttctttttctcttcctgtcttgctttcccttttccccatcctttcactcactttgataaggcaaactgccatgtagtcacaaaatcctagacaaacaagtctgtacctatgtgggcgatgctgtggatttagtaagggaaacagttccttgataaatttctcctttagccctgggtttccaacccctgtgtcattcagctatagaaatcttctgatattttctcccactggtcattttcactcaggctgccatcaaaatgagactacccaatgttctttccatttgttctgttttcttcctcgcctctgattccctgcctggtccacttagaaagtctaccttttttccttctctcttaataccaccaatctctaaatctgacttctcctttctaatcccatagagcctgccttgtcatctccaaacaagatccatcttggcctcctgttatcctcagcccacagcagtatttcacttacaacgttcgttagtttctacctcagatgtgtcaggcatttagtttgtaccaatattttatttctttttatatctacaccaagcctgcactagacggtccaaggagaaatttaactgattcctgttttgaagtcctccccactccttgggagagttaaagattcctcagtgtgttaggtaatgatagttaatatttattaataacttactgtgtatcgactgtattctaagtgctttgcactgttagaaggagaataacctaagactgtgccaaacagcagtctagaacaaagctgaattccttgcttgcctggcaagggagaatgtggtacatactaaaggattaatacatgttcactattaaattgattgattgtggtggtggtgacagtggtgatgacttttcaagtgtgggtaaagtaattttttccaacaaatccacatccacatatttaagaaaagagagacatttcattctatctttttgtgtgcctttgagaggacacccctggcacccaactcccaggcaaatgccaccatctgtgtgattttccttcatttgccaacgaaggcacagcaggtactactaggttaacctttgctttcgcaagtcttctctcaaaatagtaaacacttcagctgttggaaagctctaatctcaaactgcaaatttaaaaatctctctctggagttcaaaaaatagaaagaaaaaataaaaatctctctcttctggaacataatgtttgaactgttacatattattcacactatttcacattatgggattatgaaatatggttttaggtgttagaaaaacgaaagaaaactattatttgttaacactaaccgagagatttttatgatattcaagtaaaatgatagaatgaattattttaaaaatgcatgaatcttcaccttctgtgaagtgtcatggaggattagttctaactaatatgcctgtaagtaactgacttaatgcgtctattggttctcttaatgctgtaagtgacagaaaactggtctcaaactgatttaaacaataaatatgatcaaggttccggttttttgtttcttgttttttttttttttttttcacatttctctgggttctatttttctgtgttgacctagcagcttcacctgacttccctcttggtgacaaaaatggcctgaagccgtttcagaacccacatctgcaaacttacttttgatgaaaatcatctctttagggaccttctttcccaaagcatccaggaaagactgctctgaaactgactggcctgaattaggtcacatgctcattcctgtactaaatcacacctcacttctacagctaaaagtcattaaatctcaaccaaactctacagctgcaccacaacaaaggtagagaagtaggtgcaaagttcctcaaaggaacgtaagggtgaaagatgattgactgataaacagacaggtagacagaatagatagatgaattaggaaaagataaccaaccaatatctgtcacattgctttgacttgattttttagtcaattaatgaaactgaatggtaattttgacattacaacaatactttccaaatgtaggcaggttgtggagatcatttaaggaaaaaatgtatgaggtgttgtagcagatactgtcggtgccccaccgatatccctttagcacttaccatttttatacgtgcttcttaatttccaacttcctgtacttgcatctctttgcttggggctatctctgctcattcttgggagagagcagaaatgtagcagttatgcccctgtagagcagcagttgatagatcaataccctgtcccccttgcccttcagatctaataactccaagcttaattccctacatctttcatataagtatatatataagtatatatatatacttgaagttctagggtacatgtgcacaacgtgcaggtttgttacataggtatgcgtgggccatgctggtgtgctgcacccattaactcgtcatttacattagctatttctcctaatgctatccctccccagccccccaccccacgacaggccccagtgtgtgatgttgcctgcgctgtgtccaagtgttttcattgttcaattcccacctatgagtgaggacatgcggtgtttggttttctgtccttgtgatagtttgctcagaatgttggtttccagcttcatccatgtcccttcaaaggacataaacaactcatccttttttatggttgcgtagtattccatggtgtgtatgtgccacattttcttaatccagtctatcactgatggacatttgggttggttccaagtctttgctattgtgaatagtgccgcaataaacatacgtgtgcatgtgtctttatagcagcatgatttataatcctttgggtatatacccagtaatgggatggccgggtcaaatggtatttctagttctagatccttgaggaatcgccacactgtcttccacaatggttgaactagtttacagtcccaccaacggtgtgaaagtgttcctgtttctccacatcctctccagcatctgttgtttcctgactttttaatgatcaccattctaactggagtgagatggtatctcattgtggttttgatttgcatttctctgatgaccagtgatgatgagcattttttcatgtgtctgttagctgcataaatgtcttcttttgagaagtgtctgttcctatccttggccgacttttcgatgaggttggtttttttcttgtaaatttgtttaagttctttgtagattctcgatattagccctttgtcagatgggtagattgcaaaaattttctcccattatgtaggttgcttgttcactctgatggtactttcttttgctgtgcagaagctctttcgtttaattagatcccatttgtcaattttggcttctgttgccattgcttttggtgttttcatcatgaagtccttgcccatgcctttgtcctgaatggtattgcctaggttttcttctagggttttatggttttaggtctaacatgtaagtctttaatccatcttgaattaattaatttttgtataaggtgtaaggaagggatccagtttcagctttctacatatggctagccagttttcccagcaccatttattaaatagggaatcctttccccatttcttgttttttgtcaggtttgtcaaagatcagatagttgtagatgtgtggtattatttctgaggcttccgttctgttccattggtctatatctctgttttggtaccagtaccatgctgttttggttacagtagccttagtttcctacatcttcttttagggataacagggagtattaagattcagttgttcacattgatgacttgcatgataatataccctttattggctatcttccctatttcacttcttctcaccctgttgatgtgtcctggaatcacatcccaaaactacttgagctcaaatttttatttctgggtttgctactgggagacccaaatcaagacagttggcttcagtactcaggtacttacaaggagatcatggatatcaattgaatcagaattccatgtcatagcttttcaaatttatatcacaataagttgaaaagatgttgattcttccttccacagtattttctgtttctgtgtgtcttacattctggtgtctcaaaacatggctgcaaccagggaaggaattgaaatttggagtaaatgtcctattttagtaggtctacatttaagacatggacctgaaattgagatcataaacaaaagtagatgtgagcataaagtagaaggtgaggttggagggggaaattgtttggatttactgtaaccaatggagctgcttagtctagtcaaggaatttcaatcatttctgtggagactagatgacttatgttatacaaggatatctctggaaaattcactgtacagttttactaaatctggctgataatatgttcactcaatgttatgatgtcaataatagaatggatattgcctttaaagacaattttaaagtaaatatctcacatattcctactcatttatcaagggctgtgtcattcatggcaatataagataattcttttcactttcaaaatcttccagatgcagaaactttccaatatttgctgtagatgaaagtgtacaatttcacaattcaatgggacaaaaagaattaggaaaaatatgtttcagagagtttatttggtatcatctacaagacctggtatgagacctggttggtgttgtatggaatgaaatatatcagtctgttctcacactgctaataaagacatacctgagactgggtaatttataaaggaaagtgatttaattgactcacagttcagcatggctggggaggcctcaggaaacttacaatcatggcagatggggaagcaaacaccttcttcttcacatggcagcaggaaggaggagaatgagcaaaagagggaaaagccccttataaaaccatcagacctcgtgagaactcactgtcacaagaacagcatgagggtaaccgcccgccgtgattcaattatctccacctgatccctcccaggacgtgtgggggttatgggaacaacagcttaagatgagcttttggtacagacacagccaaaccatatcatagagtttcgaatctgaaaaacaaaagaagctaatttagtttcagaaagctgagatttcatgaaccatttaaaaattcactttataatttttcatgcattttgaagcctttatcctttaaatggaaatggaatagaactattattcgtcatttctaaactgtgcattcatcaacaattttcagaagttaattccaacatgtcttcatcaactctatattacatgttagtacactacatctctattttcatgctataattttttactttttcctcacactttcatctcaccctctcaagatgtgttaatcccctttgctcttttccccatctcgtctctgttgcctttctccccccttcctttttttttaatttctgttctcttttacctgaaatctccctcttcatcttttgctaccaattatgttcttaattggttgaagtgagcaaggtaggaaattctccattttgattccattctctcacatggtttatctttaatatgttttaataaacagtttaacataaatcttacttccaatttaacatgtaaaatttagaaaattggtgaaaaatatgcctgctttttcacccccaaagaaccaagtttaaaaagttttgtgactttgaggcatccttttccctaaaagcaagcttaacagattcttagcattcgtctctgtgtgaaattgtggaaactttaaaaaaactatttgaagtaccaacaactcaaagataaattgtctgttttaaatgcaaggtgctaaaataaaactagaagattgacaatattattcatctttatcactgttctacttaaaatttgaaaattaatgttagaaatgtgagagggtgcatgaaaccttaatggttttatcatttcatctgagtatatatttgatttcttctttctgacattgaaactttaaaattcgccactatttttcagtaactcgttaaaatatggtccgttcttatatttgcaatactcctatactgaaaaccctacaacttcaccattatttaatttttatgttactatatttgtttcttaaaaagattataatattatgtattagttgtctattgctgcataacaattactacaaagataggggcttaaaactgtatctttagagtatcaggatacatatgggtcagaagtctaggcatagattatccatattctttgcttcggggtctctcacaaaggctgcacactaggtgttggccagggctagggtctcatttgaaagcttgccttggaaggacctgcttccaaactcacctgttgttggtaagtttcagttccatgtgggttattggactgtagtcttccttttcttgttggctgatggccacgtttagttccttcggtctctaacatggcaatttgcctcatcaaaatcagtgagagaaagtgggggaggggggaaagagacagagaaagagtgaaattgctagcaagacaaaagtcccaatcttatgtagcctaattggagaagtgatatccttttgtctttgacatattctgcttgtcagaagcaagtcaaaagtcttgaccactctcaaggggaggaaattattaaaggactcaaatactaggagacagagatcactgagtgccattttagagtcttcccaccacggattatttcccttcacctgctggcatttgaaaatgcagctaatactctgggattctccaaacctaatttttttgtataattagagaagtatttgtcataatctgttaagtgtagtaatatattaagaaattgaatttattccttcatatttcaaaaagtacatggggttgggggacagctatgttgtcataaactttaatacatacatgattggaatggattatgaaatatttttctctaagagatagtataaggctgcaaccactgaggctcccaaatacagatgattcatatgtatttagttttaatgcaaagcttctcatgctgatttaaactctcatattttcatatatggtgttttattttttatataatgaatgtctataaaattcctattattttttcaaaagtattgtggcaaatatttcctagtaaaatctaaagatatctttgacgtaatttttatgctctcatttatgttaagaactcaatattgaagtaatgttctttcttatttcctagtaactaaaatccttactatattcatgaagagctgtgcctctattaaaaagcttttattgcaaacagaaatgtcaaaatacagcaaaggtagagctatgtatgattcttcatctgtaatgtaattttaagtatacattttattgcataagcagagatttatacccacatttgctttcagtattcacagaagaattttcatatgtatttcttaaaataacaaaatggctgctttggtgtggggatagtatggtacagcatttattgtgaaaatgattcttatcttccatctttttcaaatggtgagttcagtatgtttaacattgctggttttataatattgcgaatatttttgagaggaagaaacaataagagactgataagaataattcatatttgctcaaagtttaatcagttttttatttgaacaaaaacttggacgaaatgtccaactttcctttgagatcagtgctctccaatgtggtaacaacagcctaccatatgagcatttgaaatatggctagtccccactgaaatgtgctgtaagtataaaacactcaccaaattacaaaacctaagtatgaaaaaaataaaatatctcattggtactttttatattgagtacaggttgaagtgacaacaatttggctatttaagttaaagaaaatataacattaaaattaatttgacctgttttttacttttgtaatgtgtagaaaattttaaattacatgtatcgctctcattataattttattggatgtcattgttctagataaacaatggcaatgttgagaggtgtcataatagggacaattgtctctgtgaagaagaaattatatgaaccctacaacatgtattagccgcagagttgcttagaattgacttactctgtcttgttgaaaataggttttcccttaaaatctctgcctgatgtagccaaccacgattcaatgagcaaacaaaaatcttaaaggggaaaaaatcattttttgagtctattttacacacccagtatcaaaaagaaaaatataaatccacaactaggattatacgggatgtaattcttggatttcttttggtcttataatgctttatacctaggagatgttcaacaaattattattgaatgattgtagtttaaccgtcagttacattttgcagcaatacatttattagtagcaaaatctgagtgtttactaattttcatcacctaatcagcaaattagtactgctcttatatcgctttgcctacgctctactcactggttcaatcagctaattttttcagaattttatggtttataaaccactatatgttgcacagtatttcctatacattagctcatttgagtcacagaagttataggaggtggatcttgtctttctttgttcagaaagagaaatccaggttcagcgaggttaactggccttgtttaagatcagcacgttgctaggtgacagaaggtgttcacttctcactgaactttgcatatcaaaagagatttaaagaattcactttggagagcgggagttatggggtgaatattttatcatgttgtccgtcttaataatcaccaatttgatactaaggctgctagtcatctctaacgaagagaagttactttgaagttggttgattgattgttgttgattgacagaagtattagttttcagaatgaactaattcattaaagaaataaaacattgggtttgttcattccataaataattgaacatttattatgtgtatgataccagcctaagcagatacctaaaaggaatggagattactatagttaataacaatgcattgtattcttgaaaattgccaagagattacattttaaacattctcaccataaaaaaatgataagaatgtggggtaatgcatatgttaattatctcaatttagccattccacagtgtatgcatatttcaaaacatgttgtacacaataaatacatacaatgttatgtgttaatttaaaaataaatacattagaaacggtaaaagtcactaggatcatggaaataaaaatgtttacatttatgtaaatattagtaatataatagagggcatatccaaaatatagtgtcatattaataagatgttgtatgattattatagactacaaaataataaaggaatagacagaatgtttctaaataaagaatagaaattacagtgaagcggaagagagagtaaccctaaacccttcataatcctccctttgcctcgtagtatagcttggaaagtaattatgtggaaagttgagattgcaacaaaggacggtagtacaggagttgcccaaggacagacaattattttctcaaataaactatagcagaagcaaaatggccttggaccacaaaagaaggccctcatgtagacattgttctattctgaagtagaatttgcagtactcaagagaagaggaaagattattataggtggagagactgtaaacaaaatattatggtaggattcctcctgaatagagcaaggtgattgtgtttgacattgaaaaggtatgtttgggcaagagtttgaaaacctttagccaccatgctaagagatcttaaatctttatctctgagtaagggcggtggttgtggttaatgatccttgagcacaactctgtcccattaaagacagtagattcaactgcttctagcattagtccatatcagggagtaaagtgatccgatacattattttcccccagtaaatggttcataaaggaaggccttggctctgccttgtatgtctacatgggagaatataccagaatgtctagaggagcatgggtagcgtaacctttccccatatgcacatacaacaaatactgataatccactcacaggggagggactcatttttaagaattaagttttattttagaagactcagtctgatggcaatgcaggggttgaattacagcaggtagagactggaggtctacaaactggtttgagatatatattttttccggtggcccagataataaggacttgaacagacttcttgctctgggaatgtaaaaggccaggctggatgtaagaggttaggaagttccaaactgtcccacattttcctttcttctgagccctccaaactgtaccagactctgcatgttacgcacttccaaagtcgcttccacattttcgggtgtcttttcagcagtgccccactctactggtaccaaattactgtattagtccattttcacactgcggataaagacatacccgagactgggcaatttacaaaagaaagaggtttaatggacttacggttccacttggctggggagacctcacaactatggcaccaggcaaggaggaacgagtcacatcttacgtggatgggcagcagtcaaagagagagcttttggagggaaactccgcttttcaaaaccatcagatctcatgagacttattcacaatcactagaacagcacaggaaagacctgcccccatgattaaattacctcccactgggtccctcccataacacatgggaattcaacatgagatttgggtggagacacagccaaaccgtatcagtgatgcaaaataaaagaagactgtggagtaaattacacatggagaaaaggaagaggaactaggaagtatagatactgtgagaattaactctctgttctacaaaagaagaaatgggcttaaagtggttccccccaaaactaaaatccaaaggcacataagtcataatgcacactgttacaccgagtccttccagctcttaacttacttgttttactgcactacacttgacttgagttttagacttagtaaatctgaggtaaatgcagattgagaatgagaacaaaatgttaaaaagagaagcagtctcattttcttactactaataggcattgcagtttgtgtgggctctagcagggatgtttgtaccactgggatctaagcatctatttctatattataaatagaaaaattaggttgagctatcgcgactccattacaaacttatggaattagattctctggtatggagcttggatatacatattaaaacaaaataaaacaaaaactcctacccaattgattctgctgtgtgctctagttaagactgttatggttaagaaaataaataatcgctgtatggaatgtatatcgtcctattttaaattaataaaaaaaattttgcaggccttcccaccttccaactcctagagacaacaaatccagatttgaaaatcagtcatattaaatagttgtatcgatatttaccctttgtttctacgttattattttcttcaattttcacacgtatttgttcatcagttggttatgatggacttcactttttttcagtcttacgaatgagatttctccctccaaaaatcaataggcacctgctgattttatttattccaacatgaagttgcagaaaatgaatatggccaaaaatggttaaaaaaaaaaaagcctgttcttcaaaagactagatcgtcagttgaagcagaaaattatattcagtgcactggatttatgcattgttttagccttctccaaccaatttagaaatgcattttcttataaaattgagattattacaaatcctgtgctaagcagctgaaataatgtgcctatgccaaggtcatatcttaaaagtttggaggagcacactgcaattgaatataagtttataaatgtattccacatacttttctgatatattttaataatttaatttttacattttacctatattgtcttcattttcactttacctttggtggtgtttcatacatattcattgtttggaagaaattaagcagacagtattctaaagtcaatactgagtctgctaatgaaaatggttaagttaattaactaaatggcaaccttcactgaacttattcaaagctatttcccctcatgatgtgttttcctgaagaaatgatgcataaaaactaaacccctgttattcgctattcttctgtatcagcctctaaattgtcactttacatgttacaacctgttgcatgatgattaattatgacaatttaatggcatgtaaagggtaaaaccctaaaggattactcaaaccatcattccttaagaaaagaaattgtaatgcctaggttatcttctagggtttttatggttttaggtctaacgtttaagtctttaatccatcttgaattgatttttgtataaggtgtaaggaagggatccagtttcagctttctacgtatggctagccaattttcccagcaccgtttattaaatagggaatcctttccccattgcttgtttttctcaggtttgtcaaagatcagatagttgtagatatgcggcgttacttctgagggctctgttctgttccattgatctatatctctgttttggtaccagtaccatgctgttttggttactgtagccttgtagtatagtttgaagtcaggtagtgtgatgcctccagctttgttcttttggctcaggattgacttggcgatgcgggctcttttttggttccatatgaactttaaagtagttttttccaattctgtgaagaaaggcattggtagcttgatggggatggcattgaatctgtaaattaccttgggcagtatgaccattttcacgatattgattcttcctacccatgagcatggaatgttcttccatttgtttgtatcctcttttatttccttgagcagtggtttgtagttctccttgaagaggtccttcacatcccttgtaagttggattcctaggcattttattctcttgaggcattaccattcaggacataggcatgggcaaggacttcatgtctaaaacaccaaaaccaatggcaacaaaagccaaaattgacaaatgggatctaattaaactaaggagcttctgcacagcaaaagaaactaccatcagagtgaacaggcaacctacaaaatgggagaaaattttcgcaacctactcatctgataaagggctaatatccagaatctacaatgaactccaacaaatttacaagaaaaaaacaaacaaccccatcaaaaagtgggcgaaggacatgaacagacacttctcaaaagaagacatttatgcagccaaaaaacacatgaaaaaatgctcaccatcactggccatcagagaaatgcaaatcaaaaccacaatgagataccatctcacaccagttagaatggcaatcattaaaaagtcaggaaacaacaggtgctggagaggatgtggagaaataggaacacttttacactgttggtgggactgtaaactagttcaaccattgtggaagtcggtgtggcgattcctcagggatctagaactagaaataccatttgacccagccatcccattactgggtatatacccaaaggactataaatcatgctgctataaagacacatgcacacgtatgtttattgcggcgctattcacaatagcaaagacttggaaccaacccaaatgtccaacaatgatagactggattaagaaaatgtggcacatatacaccatgcaatactatgcagccataaaaaaggatgagttcatgtcctttgtaggcacatgggtgaaattggaaatcatcgttctcagtaaactgtcgcaagaacaaaaaaccaaacaccgcatgttctcactcataggtgggaattgaacaatgagaacacatggacacaggaaggggaacatcacactctggggactgttgtggggtgggggaaggggggagggatagcattgggagatatacccaatgctagatgacaagttagtgggtgcagcgcgccagcatggcacatgtatacatatgtaactaacctgcacaatgtgcacatgtaccctaaaacttaaagtacaataataaaagaaaaaaaaaagaaaaaagcaaagaaattgtaaaatgttgttctatcagaaactcggctaattatttttaaattttagatcaaaaactcaactagttttaatgtactacttataagtcagataaaatcattttttatttttgttttctttttgtttttacatctgttagaaacgatggggtcttcaaagtaaaagaagagatttgcaatgcctataccaaattagttattttaggatactgaatgaaatggttttctatactcaataaaggtaaaagaataagcagaggtagatctggttttctgaaacttgaagcacattctaatttggcagttttctttaagtcaaagaatataacaggacaaatataaaattaggtatgaacatgattatagaaagaaaggaaatcataacaaattatacgtttttaaaaagatgacagataaccacatacatcacaaaaattgaaaaaaataagcagaatgttttcttaataatgaaccatctctgcaatactagaatatacagtgtctgaaataattttttctatctttctggatgcatcctctttcagcacctcttcatgtgagagcatcagaaaataatttactctttcccccagcattgttgattaaaatttgacttctatcattgatagtttagaaaagtttattttacattttcaacttattattggtgatgtcacataaattattacaatttattgtccaatttaggaagaccctgccaagtttctttcacatatgaactgtaaaatttaaaagatcattcaagttatcttgtacaataactaatacatatttttcttttagtcatactaaaccctgatgctaaggatcacccaaactttttcagggaaagaagtagcttgcaaataaatcaaggaccatttatccttactttttggaagaaatggaaaaggataaagtgttagtttaaatacactcaagaacagaatgtaagacaagaaattggaagcagagaagttcatcctcaaatgtaagagtgaaagaatagggttaatgaaacaggaaaggggaaatccaagaaaaattatgccgcgctttagagaatctcctaagcacagagatattggcaatgtgcagatgaaatagctgtcacaggtcagccatgtcagaggtgattccagccactaagtatctactgcagattagatatttggaaagcagaatgagctctgttcatgccattactggggcttgacttcttaatggtttcaagtccccctttgactctaatccttctaaagtcaactttgtataaactcttttcaaaagtgtttatccctgtagaataagttcaaaactccatgtcatggcacacaaaactcttcaaatcatattcagctggtattgttttcttccacattccagtcataactaggatcccaagaattagcaaataaaaatatgaaacatccagaattctaagcataactatgtcccaaatactacaacaaaaaatactgaaaagtatcgattgcttatacaaaatgtaaatggtatcctgtattttataaggcaaccctagtcataagatctctttcttcttcctcacacactgtcaagcttgagccaacagagtaccttttaatgggctgcgcagaatagctttcgatagtttacccattaattaacagaaaattcaaatgagatatcctctgtgaaatcatccttctctcctgcctcctgtctctccattctttctccaggagacagaggccctccagactccatgactttgtagtgtattgtgtctgtctttattagagtattcatcacttggtaattgaattctgtgtttaaatacattttttttcttccagaataagtgttcatagaagggagggatgatttacctagcatactgcctggcatataaaaggccctaaataatttttcttttaaccagtaaccaactaaccaattcaacagttttttaaatgagtgaaaccactttttaaatttttttttaaattcatgcttcacctgtaaaaatatatagatgaattgcaatctggaactctgagtaatttatataaaagtgatgaaaaagaccatggcttcagatttgttgttttaattccagcttcagttcatacaaacattacaaagtcgcagtatctactgtgtaaaaagtttcatcccaatgaagaaattaaaatgtctgtctaatagagatgctctaatggacagcgatgtgtagacttcagaagaatctcctcacacagccttggaggcataagttgggaacagagcaagttctgtgtttgcctttcaaaggaatgttcctttccctttcattgacaaatattataaagatgccccaaaacttctgtgagtttcccccgggacgtaaggtcctctgcattttcctaacttgtttctcaaagcggtggttcccaaggcctgagaatagctgtgtctcagctctctcctggaaaccagagcctaaaatgttgccacatcatcgggaatgtagctgcatacttagccagagccaagagatgagccccactcgcaaagcccatgggctggacaaaattgttagccatttggtgtaggtcattgcactaggtccattacacaggttatctggcaggagtcccggctttggaggaaagacgtttaaatcctgtaaataaatggctggaacaccatggcagttgattgtgttaagccctcatccaaaattgctttgttaggttctattctattgctcattatcttgctgtgaagaaaattaagcttacatctgcttagggtgacagggtatcctgttgtcacaggattttccacattttaggcctatgtcacaagctcccaataaaccctcagagaagatcttttgtgttcacaggcatccaggtgtcaggcagacacagtctttgtcttcttgaagctcagtgacacgttcagggctgtgtatactcctccattccctgccagagacaaaatgtttgtggaacagtcaagctagaagggacctcagaattaatctgatcaaatgtctgcatttttcagttccaaggatactcagggaaggccctcggattctataagtagcggtagaggtggtattagaagtcaggttgcctgacttccaaacctctgttagttactgtcccttcccctgcatgcagcactagtgtaatccctcaactctcacttccctttttcgccacatgcctctctctctttccttcccttgattaccctgcctatccctcctacaagggaaactaccaccaggcatcctcatctgagacccgggaatggaggccaggtcttttccctccctccctccctttcccctttttttgtgtgacagtaacattattcaagtacagctcttccttttttcagtaccttccccctcagaccagaagttaatgaaaaatagggttgcgtgatatgcagcctgggggccaaaaatgtaggacaagcagtgtgcttcagacaaaactgtagggttctggtttcatgcacaaccttggaggacggtggctagaggccctagtatgagagatcaattaaacatggaggccagaaattaaccacatgggattaacatacgtaaggttgcttcttttcaatgagtctaggaaacacactggggacaccttgttcaagacaagctactatttgatgctccttcatacgcttgcttaaaatatttgttcagcatttatttagtgggggcaagaaaaattgatgttatgttaataagaaaacctctttacctcttaccttttattaaaataatcaacttagaagatatactaaaactcacatgacttttgacatctatggatgatctttcatttaatatttttctgctattcctactatagaataaaagctgctattgcattattacagagcgtaatgtgagccacatatgttattttaatcttaatggccacattaaaatagtaaaaataaacaggtgaaatttatttggattatatgttttatttaacccagtgtatctaaaattgtatcattttgacgttgcaatcagtgcaaaaatacagtcatgctatgtgtaatgaggttttggtccatgataaactatatatacactggtgatctaataggattataatacagtaggtttaccatacctttttctatgtttaggtatgtttagatgcacgagtacttgccactatgttagaatttcctgtagtattcagtacagtcacgtgctgcacaaatttgcagcccaggagcattaggctatatcatgtagcctaggtgtgtagtaggctatatgtaccacctaggtttgtgtaggtacacactatgatgtttgcataaggataaaatcacctaatgacacatctctcagaatgtattcctgtcattaagtgatgcatggatgaattaaaatattttggattctttttttttttcagtactatgccttcggaatccaatatgtattttacagcatatgtctattccaaataggcatattctgggctgggtgctcaatagctacatgtggttagtggctaccatattaaccggtgaagttctatgcccatcaaggctacacgtaatttacagggtataatagtattttaaaaattaatttttttctggcttttatgttgacatatcgtttccattttttaaatttttgttttattttctttcactgctttggaaacgcacaacttcttggaatgcaaattaaaagatatcaaataatgatgtagataatttgttattgctaaatgtctaccacttgaaatattcaagtttcaaatttcagctaactgcgattgcaagcttcagctagctggtcccagatggatggcccagctaaatcagacatttgtacatactggctacaaagtgtcccaaaaacagaccaggagggtcgtggatttaaaaaaatttccaccaaaggatgctgtcttgtccattttccaatttgggtaaattaatggatactgcatttaaaagtttttttatttctcgtacattgaagccctgtactgcactcaccaactcacccgttaaagcggctctgaaatacaggcaggaccaagacttagatggactggaggttgggccacaactccttgaacacctagagcagaggtcagcaaactttctataacggtccagatggtaaatgttttaggctttgcaggccaataggtctctgccacgactacttaacaccgctattgtggatcaaaagcagccctaatacgtaactacacataaacgaatgggcatggctgtgtcccgtgacaatttacttggggacacaaatttgaatttcatataatattcatgtctcacccatttattaattattttcagtttcttcaaatgttaaaacaattgttagttctcaaactgtacaaagacatatggtggctgaatgtgacccataagccatagtttgctgccctctgcccaagtctcctgttgaaatggggttatggcaacaatcctcgcagaatataaaactattttggcacctgacttttgccctgatttttttattgtttccagagaaatcaagtatttttctttttcaaatttatatccatattctctttttttctttgctctcttctcttctggccagcaggaagagaccaacccatctttgaattgtattcactttcctcataccgtcacacagctagtaaagctacaacttcacatatgccaatgccaactcttcccgatgttgtgttcaaaacctttctaagcatcaccattcccaggagtagcaattctatatgatattattattttacttgttggtaaggttaaaagttccagggatactgattttcttctttgttagccatgtttcattgagtggataagcaatatgcatttgcttcatagtataaataacaataatgcatcaaattgcaacaatatgaatattacacatagaaaagataaatgtgagttatgtaggtcatgccatttgatagaaaattttttttatatttatatgtttaaacatgacaataaaatgattccattcagatgaaggcaaaggaataggatttcttttcagtgtggtggttttctatttttgttttgttttgttttgttttttagagaatgagttttggagaaaaacaagctttctagacagaaaatattgaaattaaaaccagcaattcatggtcatattattgaaactatcaaattggtatatatatttgaacactactgattattttctaaaatgttacgctttcaaaaaatcatgaagattggcaagttttttagatgcataagcaaatagtgtagtacggcttgtaacactgttcaagataacttttttataatgagtatggtctttctctgccctgtctaatacaatgtgggttttgagcattggaaatgtggtaagtgcaactaaggaactgatatttaaattgtatttaagtttaatacatttaaatttaaagttacattttgataaattgctttgtttttcttttttctttctttctttcttcttctttttttttttgttttgttttttttgaaacaacaatctcactatgttgcctcccaggctggtatccaactcctgggctcaagcagtcctccttcctcggcctcccaaagtgctaggattataggcaggcaccaccatccccagctaaattgtttcttaaatgaaacttctgaatttgaggatacgtgattatgtggtgtagttttccctttctttccccccctgaaatccatattctgaagtacagtgatttatataaaagtaaaaagaaggagactgttttttttttttaaattctattaagaaaccaaattttaacagacacctcagggcctaaataaatatcaagttattgttatttgttatggttcttgttgcttgggtaaaactgtacagatcatgacttagttttccttgaatttttatcaaacaaatgaacaaaatgagcaaacaaaaatattaaaaatgatatttcctacgaatccaagggacatttttctgtatcagccaggctgatgctaaggtccttcaagcaaataagatcaaagatttctgattggagagtgtgggaataaagtagcccttgtttagtgctactttgtagagcctttgtttagagtacggctgggagggagggagagagggagaaaaatacggggttaatttgtaacaacacattctgtggtgtgcgtgtgtgtgtgtgtgtgtgtgtgtgtgtgtgtgtgagagagagagagagagagagagagagacagagagagagattaaattacatttaacttctttaaattttattgtcctcagggtttaaacagtatgtgaccaaaatcacattatttagtgaagagtttgtgggtaggtggatagttagatgggtataaatccctataaaatccattttagaactattgaggtttgagcaaatcaatgtcacctattcacttcatttgtctaatgcctccaggagccattaaagggcttgttacctaactttagggtaggtttagatcaaggtgaacagtcagaaaatattatccatgtactcacgtatattattaagtattctttgaccatggagttagatgcttatactgcaaacaaataaattaatgaataacagtgctgctcatgaacaccaaagtttactgaaaagtcaatatggttttagtgtggtaataagggcagagttctccaaggactgccaacctatttattgtacatcaaattttactgactttgaaatcttgctagaaatgttcatttacctcgtaatgtattatatgtttgaggtcttgagaaaaataacaaaatccatgtgtggtaatgaagtggttatgcaataaaactaacatacactgtgatttgacacaggggacttcactgttatcagatacttaaaactggaaacaatgtaggaaatatagatgtataagcatcgtaagtaaaatccacatgctttaaaaaggaaatccacttacttttaaagtaatattccgagagctatgccactgggggctgaatgtcataaaaatgatttgtaattagtcacttttacattgtatatggatttatagttttaaaatatctggtggcatataaccacaatgtatttttcagtcatatattcatcattattttattaaatttccagagggaaagaaaataaatgacctcctagtgagggatattttaccacgagaccagttgtaaaaataatcgagttttgtgcctgggaagatatctttgctaagtctagttctccagtgacattaatttattgttgttaagaaatgtgtgaggcaaaatgaactctccaaatatttcatactacgtgcattttatccaaaagaagataatggtttacatgaattatttaattggtattactaatttgggggaggtgatttttggttgggggcaacagaatatttgcctaaaatgcattcagagtgcgctgttatttagctattttcaaggtagagggatattggcattggagacttacacgtagccatacaatggccaacttcagtcaactacagaagcaatacagggcagcggctggaacaaaatagctactaggtaaatattgattgaattaattacacggatattaccactagtcctgcaattaattaatacctagccctgtctccagccccagaatccatgacatcaagctaactaacagaaaacatatcaagaattttattccttagtcctcttgactgaccctcaagagggtctaccctcttctactctgtattcctcacatcaaatttcactagtccagccgccaagtaacacctgttctgactgtgctagtgaacttggatattcacacatagcctaaaatgggaaacagagttggaaatgtcatgtataaggacataagcgttttcaaagtgtacaagaacataagcgtttttaggagatttaccttctcttttctgttttattagcgaatgattgattgttttgtatgattgttcatttaacaaatgctatatcatgtaagaaaagttactaacggtatataaagatgtaaaattcaattgtggctgtgtgtatgtgtgagtattctagcttttggggagagacaagagaagaaagaagacataagttggaagagaacagtaaaataaagaaaaaagtaataactgacggtgtctaatgaagtagcccaggtaattaatgctagagtttattagatagaatcattatttccttccagagggattaagcaatcttctctgaggaggtggaacttttattacccaaaacatgaaggattgggaagagttttatatgtgtcgataaggaaaagagatattttattgagggaaaagaagacattttaatggcagagtacacaatgtcagaggaacagaccaaaagaagtgctttgttattaggaagatttgaagaatggaagatagcgtcagattgttaagaaccattttttagataaaggcaggctaaagaagttggaggctattggaaatcagtcacacaattttaagcaagagaatcaatgagtggcagttttgaaaactgaatttgatagtggcaaggaaaatagggctctatcatcccacttactttcaaagttatgaagaaattgtagtaagctccagtcagtacctaaaggaatttattttgtgaaattgtgtaaacaaaaagcaaaccttcttttgcactcatatagtatattttctcaaagtcatatagctaaagggaatgagaggtaaaatagtacagtggttaacaggataggcttcaaagcctaacttcttgggttcaaatcctagcttggttaccatttcacagctatctgaccttgtacaagtcacatgcgtacactgggaacaataatactacctgtattatagagttgttattagatgttgttgatagatatgttgggcacattttaggcactacatacataaacctctttctatagaagtatacatgtgtacctatatttaaaataatgattttcttttttaaaagaagcacatattcattgcagaaaatttttttgaaattttaaaagtaaaatctctggtctaagtgcactaaaatgttttagactttagatatgaactacaaaaacctacctcatcgacacccaaccccactcccagagatatttcattttatttgcttgctatcagtaatgagaagacccaattcaccacacaatttctgttgtatgagactattgtattgcagtgcaagatagtgttttaaatctttgttaaatcaataggtgcaatattacacctccctgtttgaattttcctagtgaagtcaaacaattttaataggcctatacataggtcagttatagttctttcctaaatggtctattcctcattatcctttttaattgagtatttgtctttttttctactgatttgtgagaatgtttttatcttaagagtgtcaaaaagatgaattgtttttgcctttttctttggcttgtttgattttttatgtaaagaaattttatactgctatgaatgtaagtcattactttatggcttttaaattaaaattataagaatagcctcccatattttcattacttttatagttcaatttttttacatgtaacatttcattcatctggtatttagttaggaattgtgtgagataggattttaaaattaagttaaaattcaatcaagtctttattttttaagtacagaagtttccgaattcagcatttacattaaattttttgaaaataatgctaaaatatcatgtaaattattacttattggaattgaaaattccctattattatttttaatctttataacaacttatgttatctatgcttctattataaaataaatgacaagccaaccaaaatagagaagatgcttatcacaattatatcatgataatttaaacatgattttggattaatcataatccaaaaatgcatttgataagcattctaactgttcttctagtccccataaaattaacaaatggcaaacagtaatgttttaattttcaaaatattcatattaatattcattttcaaaatatgtttacttgcatgcatttcatttatattatttcttattgaagttgacttctcaatgtatattgctttaatgatactaagtattaagggtatagattgtactcacacaaataactattgaaaagcataagtttaaatagatccatttatcaaatgatgtctttttttttcttttttttttttttttttttttttttgtgagacggagtctcgctctgtcgcccaggcaggagtgcagtggcgcgatctcggctcactgcaaactccacctcctaagttcacaccattctcctgcctcagcctccagagtagctgggactacaggtgcccaccaccatgcccggctaattttttgtatttttagtagagacggggtttcaccgtgttagccaggatggtctcgatctcctgaccttatgatccgcccgcctcggcctccccaaagtgctgggattacaggcgtgagccaccgcgcccggcccagatgatgtcaattttgaaagatactggaaagtatgttttgggagggaagagggaaggaaagagtagaatatgaagtcagtaaaacctggatatttagtgccatctttgttacttactagtaaccttatgaatattatttatattgttgatccttaatatcctcacttgataattttagaaaatgttatgtacttcataggatcatgggtagaataagaaagtgaatataagtaaaatccatcatgaagtacctgaaatatgttgtaaacctaagttataatagtaattttattgttgctaatatttcagaggaatagccaccaaaccagtactacttattatttatttctatttaacatataaaacatataatattctttctgagtggtaactttgaaaagggacaaaaatattaaaaattacattaaaatcatgtataatttataatactcctttcaaggttactaaagtgtgcatgtatttctaatcattcacaaatatgaaaatctatgtgtaaatttttaaattttctaaaaaattgacaaataaaaattgtattattgtcatggtgtacaatgtgatattgtgaaatatcacatattgtgaaataaacattgcggaatgactaaatcaagctatagaacatattcattaccttacatacttattattttttgtggtaagaacacttaaaatctacttttagtaatttccaagtatacgttattgttactaacagtagtcaccctgagttacaacagataactaggatttattcctcctgtcaaactgaaattgtgtatcttttcatcaatatctcccaaatcaccccacccccaggatctaataaccaccatttttctctgtttctctgagtttgacatttttagatttcacatataagtgaaatcatacagtatttgcctttctttgcctagcttatttcacttgacatcatgtcttccagttcaatccgtgttgttgcaaatgacaggatttctttctttcctaaggctgaatagagttccattgtgtttatataccgcaatttctttaaccgttcatttattgatggacatttaggttgattccatatcttggctattgcaaatagtgccgcagtaaacatgagagggcagatatctcttcaaaatactgatttcagttcttttggatatatgcccagagataagattgctaaatcatatggtagttctatttttaatgttttgtggatcttccatactgttttccacaataattatactaatttacattcccatcaacattgtacaagggttctcttttctccacattctggccaacacttttcttttgtctttttgataatagtcattctaacaggtataagatgatatcttattttggctttgatttgcatttccctgctgattagtgaggttgatcatttttttttttcatatgcttgttagccatttgtatgtttgctttagagaaatatctattcatgtcctttgctgtgtgtcgatactgatatgtaaaatatgcatacaaaatcaaaaccataatttatttttaatatatttttaatatgtcattaatatttttcagtgtaataggatgtttttcataatatttactttaatggacgcaacatatttcattatgtaaaagcagtttattctatttggggagatttcgtttcactttttcgccagagtgacataattgaacattcttgtcataggtctctgtgtttatctctgatattcccctaggaaaattcatagaagtagcattttggagttgaagggaatgagtaatcttaaggcttttaaagtagttttatcaaattttctaaactgaagtataaagacacatagaaaagtacacaaatcataagaatagaaattcagggatttttaaaaaaaacttagtgtatccatgctactaccaccaagttcaagaattagaacattacctcaggagcccctctcatgttccctcccagttatgagcctctcccctgccaccaccctctcccaaagataagcactcttttgacttctaacacctagattagttttgactttgaaattactataaacagaatcatccagtatatgcccttgtatttgacatgtcctgctcaacattatttttgtgatattattctatgctattgcctgtgccatagttagtttagtttttctatgtatggtattctattgtgtgaatatgccacagtttatccattctgctaatcaatggacattgggctgtgtctattatggggctattaggaaaaatgctggtgtgatgttcctgtcctttgctgcatatatgtatatatttatttttaatatacgtggaagtacaatggctaggtcataagatgtgtacatttggctttggaatcaccaaaaaacagtttttcagtgtggtcatttcagttcattttcaccagcagtatataagacttctagttgatccacatattcatcaagagtatgtattttcaacctttatccttttaaccatttaggtgaatgtgaaatggtatttcattgtgttttaatttgcaatcacctgacgattagtgccatttttatatcctcttatgtgaagtcattatgcaaatcttttgcccattaaaaataatagttgtctttttcttactgatgtagaagttatttggatacaagtcctttgtcagatctatgcattgcgaatatctttttccaacctaaactttgctttatttttttctcttaacaatctttcctgataaatggagtttgatttatcagtcttttcctttatggctaatgctttttatgtcttgtttaaaaaataatacattaacctaaaattgttgagatttttttctatattttcttttgaaaactttatttttttgccttttacattgaggtctgcaaacaatctagaatttatgttttgtgtatgatgtggagagtcaaggttcatgtttttcaaatgactaatcagttaacttggtgctatttactgaaaagatcatccttttccaacttaagtgacaccatcgtataaattaggaaacgctatatagatgatttgttctcacttcaatcccacacaggcttaattataataaatattcatgtctggtggcaaacattcttaaacttcgtcgttcttcaaagttgccttggatattcttagccctttgcacttacatataaatcttaggattggcatgtcaatttctactaagaaatggttgctgcaattttgattgagattgcattgaatttatagattatttgaagagagggcagatatctttacagtattggactttctaattcatgaagaaggtagtcctctatttgtttacattttcttcactgtctcagtagtgtttgtagtttccagggtagaagcttaacttttcggtctgaattaccaaattactagcaacatatatagtcatgcatttcttaacaaatgagatatgttctgaaaaatgtgtcattaggtgattttgttgttgtataatcatagagtgtacttacacaaagatagatggtatagcctactgcacatccaggctatatggtacagcatattgctcctaggctacaaacctgtactgcatgtgactttactgaatactgtagtcaattgtcacacaacaatatttgtgtatctagacacagaaaatgtaccgtaaaaatacagtatacaaatgataaaaaatagtacagctgcatacggtatttaccatgaatggagcttgcaggactcaaagttgctctgggtgagtcggtgagtgagtggtagtggtgagcaaatgtgaaatctaagacattattgtacggtaccatacagtttacaaacactgtatagttaggctgcactaaatttatgaggacacatttttatcttttttttttttttttgtatttttagtagagatggggtttcaccgtgttagccaggatggtcccgatctcctgaccttgtgatccacccgcctcggcctcccaaagtgctgggattacaggcgtgagccaccgcgcctggcccatttattttcattaatgataagttaaccttagcttatagtaacttttttactttataaactttttttttaagtttttgactctgtaataacacttagcttaaaacatgaacacgttgaacacccgtacaaaaatattttatatccttattgtagcagctttcttatttttaatatttttgctgtttaagcttttctgttaaaaagtaaaacacaaacacgcacatgagcctaggcctacatgggtcaggatcatcaatatcactgtcttccacttccacatgctgtcccccactggaaggtcttcatgggcaatgaaacattcatgaaactatcatctcataggataacaatgccttcttttgaactaattaagaatatagtaaatacataaaccaataacagttgtttattatcattatcaagtattgcatactgtacatacttgtctgtgctgtatttttatataactggcagtgcagtaggtttgcttacaccagcatcaccacaaacgtgagagtaattcattgcactgtgacatcactaggtaataggaatttttcagctccattgtaatctcataggatcacagtcagtctgttgactgaaatgtggtgaatgactgtataatagggctccaaggaagatcataaaattgcttgttttccagaactttgacaaagaccttttacagaaactaatataatagataaataatagtataacattgctgttttcctttgcatttcattgattactaactgtctggattttttcttgtttattggctgtttacatttttgtcaatttctttttatgttctttatccagttttccagtagatttttcctttttttactcattaaaagatttttttatatgctaaaattattaccctgtgtctgatatatgctgcaaatattcccagttgtcatttgttttaattttgattagtggctttaatttataagtgaatacgcatattatattcaatctttttatattctttttttgcttctaaaaggcttccccacgccaatattttattccagttcttcttactatttttatgcttaacactttaatttttctaaaatgttttgtgttatgaaatccatcttaatatgtttatttctaaaacagacacttttgcttatcttaatattaaaacatatacatttgaaattaacattcagagattgaaagaataaggaaagtaatcttgtgtgaaattaggtcaagatgtgcttagatactaaattaacacataagggaattgaatgtgtttgttttctttcaccacagggaacatgttatatgaagagcatggttttataatacataaaaggattattagaaaaatgatgtattttaccggtcaggtgtttgtgtctatactttgatgtgaatgcaaaatagtaaatataaatgtaaattaatttaaaacacatagaatctgatacaaaccttaatctttttccacgttatacattactcacacctgttatatttttccgtgaagtatttggaatactctcgattcctggaaactgttttaaagtgcagaagagcacaaaaaaaatatgtgttaaaagttcttgatttccacccaaccattaagtgatattgccaaagaaaactcttcagagcatttttcactgatggctttagatatgttataccagaataataatgattcattattaaaatatgcaaagtgtaatttctcaacaacattttgtggtaggaagatgagctggtacagtagttttccttattaaataattttttacaaaagtaattgacatggtttggctgtgtccccacccaaatctcaccttgaattatggtaatccccacatgtcaagggtggagccaggtgcagataattgaatcatggaagaggatcccccatactgttctcctgataatcagtaagtttcacaagatctgatagttttataaatgtgagttcccctgagcaagctctcttccctgctgccatgtagaatgtgtttttgcttctcctttgccttctgccatgattgtgaggcccccccccgccatgtagaatggtgagtccattaaacctctttcctttataaatcacccagtctcagatatgtctttgttaacagtgtgagagcagactaatacagtaatgcatttacattgttcaaaatataaaaggtacagtaaaaaatatctcaccctacccatcatctgctctaccctcactgcacattaaccttaattctagaaacaaatctacaaaataaattcctgggaataaaatttccaggtcaaagtttacatgctttttatagatatggccaaactgccttccacaagaggtacacaaatgtatacttcccaccagccacgtagaagagtctgcattttcccacagccttggcagcatagtgtacctgcagacttgaatttttgccagtgcaatagatgaagctctaattttcatttctctcattattaccaaggctaagcttctgttcatgcttttaaaatcctttgtattttcttttctgtgaactgtccttatcttttgtccaattttcttttgggttgttggcctttttcttattactttgcagaaggtctttcatgtgttaggaaaattagtcccttagacatgagtcacaagcatttatttttcataattgttcatttgtttttgattttgcctatggctcttttggtcgtgcagaagcttttgattttttatatagtccagtttactgatatttttgtctgttaattaaagttatttaacttgaggatacaatttacatttttttgtggttgactactatagacatatactgcttcttacattgaaaaaataataatcctgaatttggaaattgtttttaacaaacttttggtgaaggtccatcatatttaggaacagagcttgtttgacccagaaatcaaaggtcagtgagaaggagcaatgtaaatagaaagttaaatagcatgaggtaaatgttatgatggtgggaaagacaagatctgagaggataaacctaaagcaacatcataattaagctgaaaatttcgtctcatgataagctatcatttcattattccagatattagtcaaatctgacccattacactgttttctgtcaggaattgttttacctctattacaaggaagggatagtatgggaggatgataaggaaaccagcagtcttagttaaatgttatacagatttctgtgcttatatatgaagcctaaatgaaacgtgaacaatttcatgatcagataaaaaggagttcatcgctcagttttagagattttaggaaaatatgatggctattatctcagtagcttcagagtctagaggcatttagatgttgttagttgaagctgtaaaacgctttttacatctacttgtgagtagaaaatgatccaataaaaataaaatgtttagttacctcctttaaaatgcttgaaaaataagttgaggacatcattagatcatgtattacagacgtaggagtatatttgtaacatcacctacatcacacatacctgtgtgcgcgcgtgcgtgcacacacacacacacacacacacacacaagagttcagcaccacaggtgtagttatggatgtgaactcacaaaacacaaatcaagcaaagagaacaatatctcaattcatgattcatggacattctgtgctatctgaaacacaatgcttcttttgcccaactctcacccacacagggaaaggctgccaggaatgagaggcaagaagtgtgcaggtcaccttcaacaggagccaccacctgtatttcccatcagtcttttacaccattgtagtcacgtggatccaaggactgtattccaactgacagctcctgcgatgaggtgcagttccacacgacaaagccaggcccaacatttcccattcatcttaaagttagtgtttccaaggaaacagtgctgtgggagcctagggtcagtcccagactgacctgcaacagcccaggctggatgttaatcctttgcttatacagtctcatgaatttttcacaacatatatacatgcatttacaagacgtttcactgtacatattgtttacgtatacaatcttgtttaaaattcatttttctgtacattaattgatttttttctcgacaactttctctttttcatctcctaactcttgcatccaattaaacaatgtactgttcattagtgacttattttaaaagtatctaaaacaattgttccaaagcatgtgacattgtttatgtgacacactggtatattatctagtttatttttaaaatcttctctattattattcataatatattattatggaacagatgtatattataaaattttattcatattgcagtgtaatattttgtattacagtggtattgttaatagtctcgtaaagagctatcattacaagtttaaattctttattctgggatgccagttttaactcttgatattctgaagaaaatagctttactcttgtttattctggctctgtttttttgttttgttttgttttgttttttgttttttttgttttttttttgtagagatgggagtgttgctatgttgtccaggctggcctcgaactcctgggctcaagcaatcctcctgcctcagcctcccaaagtgctgggattacaggcaagagctacagtgctcagcctatcctggctctttatttacatgtaagcttgagcaataatcactgctacttaataactttattgtcattcattatcatgcagagtattgctctaaggtatgttcagggatgacgttactgagtcctaacagtaatcctatgaagcaggtgctatcattgtccccaatctacagaggaggcattgagagttagagaaaacttggctaaaatgttaggcaagaactagaaccagaattgaaatccaagtggcctaactctagacctcacaatgcttaataccatgtcatgctgcttcctaacctatttaatgtttttttcaaccccaacgtcatcacccatgtgtgatagtgggatcataataatatctatgtcgtagcattgttggatggattaaggaagtctacaaatgtgaaacttccaaggatgatggttggcatatactgatctcttaataaaaataacctataatcattctgttacagtctactctaatccaaatgttctttttacttctcatctcaaccacctgcttctgtttactaggactcacaaactatagctcacaaaaacgcataacttaccaattttccttgtacatgaagggacttccttttacaatcttccatgacataaaagaaagctagaagcaagtatagtagaagaaatgattgctatacaaacaaaattatagttggtttggttttaattttaggatgcgcattgaataaaaatcactcatttgggatttagaagacctgtgttatatatctggtgctaatgctgaataacttggcttattcatttttataactgcaaaggaagcgcgtatggcatataatacacaacacaccagtatatttagtaactgagtgaataaatgaaagatgtatttctttactttatcagttgcagttggctatgcctttgtgtaaggtgtgtgttttgaaattccaaaaaggtattagtttctttaaagcaaagaatttttgtagcaggttaatgaataattttgaatacattggttaaatcccaacatgtaatatatgtaaataatcaatattatgctgctaaaataacacaaatcagtaagattctgtaatatttcatgataaataacttttgaaaatatatttttaaacattttggcttatgccttgagaattatttacctttttaaaatgtattttcctttcaggtttccagagctttacctgagaaacaaggagaaattgaagctcaaataaaagaccttgggcagcttgaaaaaaagcttgaagaccttgaagagcagttaaatcatctgctgctgtggttatctcctattaggaatcagttggaaatttataaccaaccaaaccaagaaggaccatttgacgttaaggtagggaactttttgctttaaatatttttgtcttttttaagaaaaatggcaatatcactgaattttctcatttggtatcattattaaagacaaaatattacttgttaaagtgtggtaaggaagactttattcaggataaccacaataggcacagggaccactgcaatggagtattacaggaggttggatagagagagattgggctcaactctaaatacagcacagtggaagtaggaatttatagccaaggagcagtgtaggagtcagtagatggaaaattattaagaggaaacatcaggggtaagtgggattctggctaaaccaacctcacaggattcttgctgaagataggccagggttatcttatcagacaacccttggggaatggtggagaatactgagggtgatcaggtaccaaggataaagggttcttgtaaaactgacaggcttctttgctgaacctggattttacaggggagtgcaaagatgagcccaggcgaaggttcagaagcctgactaaagtttagtcaagcagggaatctttgtcatcatcatcattgttgtcataatgataataattattattattttactagaatatgttgctttttcctcagcatttactagaaataaggtcttcattaaacttatgttactagaatgcctgcatcatatttgttactgtgattcattttctatccctgttttaattgtgcttaatacatattcatagattccttatccaaaattgaagttgtttatgagattaggttcctaaaatataatgtctgggctcttttgtagacattgtaaagccctctcagactgactacactttacctttctatcttctcattctgccagcaatctccccgtatagtctggccacatcaaattacctggtacctttccatccatgtaatttcatgtcatacctgtgatcttggttttctctcttctttaaatgacttctttcagtttattttgatataatgaattttcttccattctttaagaatgaattcaaagtcattgcgtcttccaagttttcttccgtaccccaagtagagttagaatccctgttaggatttcttataaacctttttattcatctcccattgttcatatgttgatttacacttaaattttatacacctgagtatttcattacacatctgcactgttctttgagtgcagagggcattctcttatttatctctgcttctccactcatatcatacacactcagcctaggatccagtaaatgatgcttacttgtgagtgtttttaagtcaatgaataaagacagtaccaagacacccagaatacgaatgagatactgcaggtaagcgtaaggcttcagacaatcctgccaattgaacaccactatctccttcttctagtgtccttgtaaatgctgattgatcttcttttctccctttcaaggaatctattccaaagattctttcaatatgctgccccgttttgcgtctccttatttgccaaaatctttaagtagccaatcaaataaaccgaatcgttgaaattacaatctattaatgaatgtattgttgggcaacttcagagtaaaaaggataagtaacatttttgagtagttttttcttttatttaattgactttaattgttaaatttatttactgtccagtattgtaaaaacctaacattttaatctccatttagctgttgttttgctggaactgagagcaaagggaaaaggaagtttgagaatattctagtgaagaggaagtaaaagtttcgggaagatgggcatgagtaacaaggagatagagggaagtttgctacaactaaaatgagttagattagcaaaatgttctcgactatgtttaccttacttcctcctgacacttatgtctaccattctgatagctactcctcaagagcagatggcactgtggaagtcacaagtagacatcatttcactagcacaaaactcagcctgctcagccagtggcacagtcttgggttcagtctgatgattaaatttacgagacataataggctttacccagtaacaaatttagttagctttaagaaattatacaggatgggtaacaacagcctgcacattaaaggcacagtggaagtcttgataccaagacgtggcttctgatgtcccatcaccctgaattttagtcatacatgatcacaaggggcaagactgggtgcgtacaaaacacatcatcgtctcagggaagccatcagttctaggatcctgaccatttctccacttagctagtacatattgtactcagaggtgtttgactagctcctattcaccagtacaattacatctcatgaatactgatttttcactgctcaataaacaaccccaacaagaaagtacagttacttggcccaatacacaataaccttagccaaattctcaattatcttatatccagtatattcttaaaaagtaactggcgtaatattgcgaagaggaaaggtcataaagtctttcctcccaaccagaaatagctttttgtagctcacggtaaaagcacattctactcttttaaatgcaatctttggttaaaatgtgcctctttattataatagtttaaaaaatactcaatgctagctatctctcttcctggaacacatttaagaaaagatttttttttgaatcccttggtacaaatagatcctgtttactcaatcaaaatgacttttgtcccagtctgtgccccccggaatggttttcaaataatgaaaacctgcattgtgtcttcgattgtctatggcccatagggctctgccaaatgggtccctgcagtttgaagtgaaagccatactcggctgtgttaatcacttttctttatcaaagctacaagtcaccactcactgctgtgtgtagtttctgagagtcatgatatttgcctcctgcagcttgttttaaatcactgaggggagagggagctgcttttttcctggcagaaaactccttggcttcagtcctctgagcacattccgagtttcttatctctggagtgcagacttcaaaaatactcttttagcctttttcttctgcttgtggctgtgttcaaggtggggggaggggaaacataaaatcatagatttgatgacttgagagtttctcccaaaaattctcaaacccccagcttataattaggaaatggtgacctgtgtgaataataatttaccttgttttttatccctctttgtctagcttccattcctttcactaataaatgatttattaagattgcacagtttttctgatttaagatataggatattagtccttacagcctgctgtattcctctgcttaaaggaattaaactatttttccattaaagaaagatgggacactagactttgctttacttagtttcaaactactgaacaccaaaaataaaatttttaaggagttttgagcacatgcccttttttttaacacaaggtaaaaaaaaaaaaacacctttactaaaatcttaagaaagagttaatgcaaaggaagtagatatacgaacagccacgcccctagctccaaatcctaaatgtaaagaaacttgccttgtctggccatggtggccatagctgcctcggaaacaaagggtctgaggccttgccattcgggtagtttgttttctctagtcaaactctgagcacacctgttagaaaaatatgtaataccctctctctgtgagcctcagttttgtctgcttggtacttcactcttattgatgaaatgcagctagctgtgtagtgaaacccagataaaaaaaagctttaagggctgtgttctaatacattgtttatgctggagtgaaaattgactgcacattgcttggtttgtgcaatttactcccgaaatattcctattcaggaaatcctgcaaatagcaatattcatcttgaaaatcacctcacagaacccttagcaagctgagaaacataatcaatgagatcgtgatgtagagggtgaaaattaggcgtaatcacagccctttcccatcagtcagcccactagaaggcatgcctttgaattttgattttcaaatatactctcaatttagacataaaatatgttgatttcagatttcagaaatgataattgaatgctaagatcccgggaccagtttagaatttctataaagggtcttatgtttttaacctttaatgaatgctttcaataatgagctagaggtatactatttatctgacataagactgactactgctttccaaactttttattaaaatatgaggtgtggcgggacacataattttatgttaaggcttagtgactgaaatactttcatcttaatcacagggagggggttttttcctcccctcaagaatcactttccttctgtggtttataaataaacatgacatgtggctctgctggctcttccttgcagtataaggagcataattgcccataatgtcaaatccacactaaaaactaccaaaggactcaattgtagtgactgaccattaaagtcactgaacactgtgtgtgttcacattgctgtgagtgttgtcaaagaaaaatagcactagacaacagacaagaaagactgtgttcaaaacttttgcaatagaggagacagattgaactcaattctgctgaaataaaaggcaggagagcctctaagtgctgagatgagttagtgagaaagtactagatatcaggagggaggttagtcaatgtgcttatttaggccatctgtgtttgctgattggcacttatcaaagttagattcctatcctcccaacagaagactagcagattggggcactatcttttttgatgattctatatcaaagtgctagctcccaagtccttgagaaagtttattcctgaggtataaaagtggcaagaggctaggagaatatttttgtctcaaaaaagtagagaaataatatataaagttttctagagtaaatgctctaagaaaaggaaggtcaggtctaaagtcaggaagaaatctgtctcaaatgtagtcaaactcagggtatttttaaagctttctttgtcaaccctccattttgttcaagggaaaccagttttcccattgaaaaacttaggaacgccagttcatctagttcatttcagcaggtttctgttgttgaaggactagctgaacgaactctgacacttggtagtaatcagacatttcatgaaggagatttccatgaaagttagaaggaagacgaagattaatggttgaagcagactgcaaactcagtttttgagtccagagggcagcaagtcaaaaagattcctagaagctgggctgtaggcattctcagatggtagagtgaggatggcagtagcaatccgatggatttcttggagcatggcacggaagaggttggagtttactgaactttttgcatggcctacaaagcagcagctccaggcatgaaagttgtctatacataatttgctgtggtggtgagtcctttgtagtttatagcaagtcatccagcttctgcttgcagggcttctttagatattgtggggaaatggcagctataagacaacctagagaagagagtccttatctcagtaataatatgggcagtcacgttttagttctcagtgtcaccaagtcaggatggtgggagaaaaatttgaaatgttaatttggagaatcgcagccagattgtaaaggaaataaactgaaaattggtaaggacggacaaaatgtgtaagacagcaggatccagatcaatttacaggtaggtaaaaaaaaaaaaaaaaaaatcatgtcgtttacaaagaaatgcaaaatagatcaaagacaatgaacaggactagaatctgataaccccaagggttactgaaactctatctctaccatcacccttttgatcagtgttaatcaaagtaagactttccttgtttataaaataagactggcctatttatttatataggggtagcaaaaatggtaatttaccaaataggctattttaagtgtgattagctggaagttttcatgaagaatcacaagctgaataagtttcagagatatactgtacagcatagtgcctatagttaacgatactgtactgtacaattagaaatttgctgagggcagagtttaagtgttcttaccacaaaatactactactctcttttaggagcagtggtacataaggtgagaggaaacttttggaggtaacgcataggtttatggcatagattgtggtattggttttgtatatatactttatctccaaactcatcaagttctatgcattaaatatgtacagctttctgtttgtcaatcatacctcaataaagtagtttaaaaaatatgaaacctcagatttgattttttaaaagtctccaaagtttaggaaggcaagtcaagaacttgacatcagattttacctgaagtaaaatacctatagattcagctgaagtgttctgttttccaggttcctaaaatacccttggtttcctgggtctcctaagaatagaccttccttactcagttgtaagattgggaattctgtaagccaggtaccgggacagttttcccaaaaggggcttatattagctccatatagtcaagagtagctccttaaaactggtcacatctgactctatgcacttaattctcaaatatgacattccagtcaaagccttggttatatatttttttcaattatgtcttgttacctaaatatatttattgagcctatgcaaataattatattgccatgaaaataagaatactcggtaagaatttctgaattttacagggatcaggcagggataaaaagattaatgtttcattctgtttacaaaagcatactctaaattctcatgagttatagataacttaagagaaaaaggaaaggcgtttcttgtatttagcaaacagaacattaaaacatgaggaatattttaaacaaaagccataatcaaatcttttatcagttcattcaggcccatgtagttaattcttgtcttgcttgatcttgagttagtagtttcatgaactcatcagcttcttcacagagtttcataaatcctgactttgtccaatggtataatctcgaagttatttaagcaatggcatcagaagtctgtgtcccagagtacctgtcgtagtacttcctatgggtctcaaagatggtcctgttttactgaagatgatgcattctgacctctaactgattgtaagagcactcagggaagcatcagcataaaccaaaaactatctgtgaacgacaaaagacttaaaatggccataattaaagatctgattcattcgacaagaaattttttttttccctggtgccatgccacattttaaaataacaactggagttaggactgatgacataatattattatcggataaagtagcaccaggatgtgtcatggacacctagagcacctagagcactaacaaagttctaaggatttattataatttttcaagtatttatactaataatagttgacccatacaactataacctagtcaaggttcagcatctcttcttgtcaaagctttttatgcaactcaacataccaaatgaacctagttatttttaacatccttcattttacaagggtgcaggaacaaatcctttgaaatttttcaaaccaatctgagattaaaaaaaattttatttaagaattgacctgggaaaagcaaaatatcaaaggttgtaaaatgacaaaaggtttgaatacttggctgaataggatcattgctcactatgaaagaatgcatggctacctatgtaaccaagatgacaataaaagatttcaaaaataaatgtagaaggccacatgacggtaaaagtttttagttctttccaaagagaaaacactactttctaaaaaaattcaaggacatacaaaatcaacacaggtacttattctgataagaaacaatatttgtttcctatacagattacccaaaatataaaaaaaaaaacaaattttgcaatctcttattaagagaagaccaatagaaaagatgaaaatgttaattagtttgaccgaaataattgttttgcaattttgtgtgtgcgtatatatatatatatatatcaaaatatgttgcatacttaagtatattcaattttatttcaaaagagcagaccaataatccaagaatattttatcattttttaacaaaaagaaactacaactcatttttgatcaatacactgttgatactaagggtcatttgtaagagtttacatacacataaatccattccgttttagccagcattggctattaacataagactctccttccacaaatcttctgccatttccaatgttcattcagattttgtcctataccttcctcttcctcattttcacagtcattttaatttaggacaaagttattctctttttccttaacaaaaacacatccaacataccttgtatattttgcatacaaagttgtttccctttacccctaatgtttctggaagttttatttacatatattgattatatttttaaccattagtaagtcttattttatagagaaaactaggaattagctaagtgtgaactgtttgtcatataccagtatttcatagccaactagcaaagcttatgaatacaagttaaattcacctactcaatatgagggctaaaagtttacatcaatatttgtggaggagccttttaagattttcttttgccctgatatgtaatttatggaggctgtgttctaaaatttgagtaaatgactgaggagatacctagtggccatctgggtatctccaaatcccatctgaacgtacacggtatccagtctgtttccaattagctttttcaacctcaggtggttgcttctggggtttgagttttccagagcccccagtagtggcagggagcataacgctttagagaccatagagagttgagagactggagtaggaagagaaaggtctgtcatggatggacaaagagatggagcaggtacgggtttgaagaggaatatgctgaaggatttaagggagctaaagggaagatcaaaagtagtcaaaggaagaaggaggaatggtggtgatgggaagggagaggtcttagatgagccagcttagggagtgcttatgttttcggaagaggccattgaagttcatctttagtaaaaatcaaactaacaagaagagaagcctagtttgtgccatagaggtgaagcatctaatcagcagtagtcttcagaggaggagaaacagaatagtgagaatgtctcctggaggaaagaggcaccgaaggaacagcaacaacaaaaaaaggaaacatgaatgaggtctctacaaacgtgatctgtacagaaaatgatttctctaaatactgaaaatctgaagttgaaccaaatgagatttcaataagaattttccatgttctaaaccaatgatgcttttcaaacaaagaagcctgggactctagactcaagaatatactcagattactgagaatcaaaatctgatgttaccatgcttccacgctttcgtgggtaaggagtcagacttaccaatggattcccaattaatcagtcaggagtgtactcaacattcacaaaattagctttgcagaggttaatgtcattaaattcactttagaatggataattcaaattcaaatagtaactcccttagatagatgtgtactagctcaagttcacctgttatctgatttcatttttaaaaaaaattttttaaaagtggtgttcgggaggtaaggaacaaggaagagacctttagaaaaaagtttcagtgttttatattggatatgaaaatatcagtggaatgtgtcctgaaaaacactggatgacagttactggacaaaaagacaaattattcccttttaccatgcaactgaacacagatttattgaatgtttttctcctgagtttaggttgcctctgggcaagagtataattctggcttgataacaccttgaagcgtgtttgtttaagtttgtggatagtttcatctattagtggaattaggcatctgcttctctttatgaacactgggtaccataatcttcctcttactttttgttttttctactcaactccaaaaaccattgctgagttgaagtagaataataaggggaaagaaacaaaagactaagtttgaatcccagtgctgacacttactggctttacgatattgtttaactcacttaccctttttaacctgaccttcttcttcactaaaaatgaaaaattgagtgaatttccctgggactctgttagataaggcaaaactaagatgggaacacatttcctaaggcgtagaaaaagacagtgaatgggacctttcttgttgtatcaggagttatggtaagaggtactaacaataaaaattaggctttcagccaggcatggtagctcacgtctgtaaccctaggactttgggaggccaaagcaggtggattgcctgagcttgggagtttgagatcagcctgggcaatatagcaaaaccccatctctactaaaaatagaaaaaattagccaggcatggtggcacgcacctgtagtcccagctacctgggaggctgaggcatgagaattgcttgaacccaggaggcggaggttgcagtgagccaagatcacaccactgcactccggcatggggaatagagcaagacttctttaaaaaaaaaaaaaaaaaaaaaaaaggccttcaaaatacccctacagcagcaagttggtaccagaaaaacactccaaaaaagggagtagatggtcatgagattttcatcgttcaccaacctaacttgcccatataaggaaaaggataaacttgagaacagtttcttgaatgagaattcctggaacagatcattcaaataggactaacaatttgttggacatgagaaaacttctatgacttttactgttccctttcttatgagggaggggagaagagtgcttttcctctttgccaagccaaggaagagggcttcaaagaacctctattatagtggcattcagaccattgtatttataaaaaataaaaatattttagaaaattgaatatctgcttgcacattttaaagatgacatctattttctgcccttgggatacagtaaatattgacattttaaaagggtttatagtacagtttagaatgtatcccgtggaatccaaataccattgcaatataatgtctaccatcatatacttaaaaatacatgaaaaagctcatatttaataaatagaagttttatattattcctttttatttaaatcatatttttcaacttccccaatgaattgtattctaatgtgataaatatgtgatacatatttatgctataaagttttattagccactctatcataattctttataaaattatatttatgtggacttaaattcaatttttaaaaacaatttcctgtgactacaaggctctaagtatttttaaaattctctagattgagtagtatttaaagtattaataataaatacacttagtaataaccaaataacctaaatatatgtaccttttgataaataattattaaacatactcagtggatagttattgaaaatgaatctattatgagatggatgggtatttgatggtaccttgagtaaagaaggatttcagtcgctaatattttgaattgtacttttatttggcataaatgtatcttgactacaatgcaccagtgggataggtcagagaggtgtgcttttattttgtaaagcggaagaaagtctgtcattaaccaaaaagtgggcaagaaaattggaatgaagtgcctaccacaggaacaaatccagtcaaatcttttttttgtttgtttgtttgagacggagtcttgctcagtcgcccaggctggagtgcagtggcgtgatctcagctcactgcaagctccgcctcctgggttcacgccattctcctgcgtcatcctcccgagcagctgggactacaggcgcccgccaccacgcccggctaattttgtgtatttttagtagaggcggggtttcaccatgttagccaggatggtctcgatctcctgacctcatgatctgcccgcctcggcctcccagagtgctgggattacaggcgtgagccacctcacccggccgcaacatgctgttttaatgagcgcctgggtgcgggcagcctcaggcctaaaatggcgttagccccaagtgaggactggacaaaggttttatagtctcctgtaaacaggaagtctcctggcctgacgtaactgctgcattgtacccggatggcctctttctcgatcttcagaggtacttgtcttctggccggctctcttcctgcttctgctatttcgccggtgcatgctgctcaggcaagtagccttgtgccttaggaatgggcctgagaaaggaggagttactcatctccttaagctttcaggcccgggagagaatcttacaacccactgatgagttatgaaatccatttaatgggtaaaataaaatagaataagatagcatagggtaccaaagaatataacgcaggttattacattgtgttacgtgtggtatgcttaagtgttgttttctggaactgttgttatcatttgtattgtacttcatttttgtttcgaattttaagataatctgcacagttttatagaaaatgagttaattagtactgtatcagtgatgtcatactgggttaattattacaaagttgggggtaaatttatccctgtataacagactttaaagataatataaataggccaggcgcaatggctcacacctgtactcccagcactttgggaggctgaggcaggtggatcacgaggtcaggagttccagaccagcctggccaaggtgatgaaaccccgtctccactaaaaatacaaaaattagctgggcatggtggtgagtgcctctaatcccagctactcgggaggctgaggcaggagaatcccttgaacctggaggcggaggttgcagtgagccgagattgcaccactgcactctagcctgggtgacagagcaagactccatctttaataataataataataattttgtttatttattgaatagatactttcttccagtacaaaattcaaaagcattgaaatcctctgttgcattgttgtctttcagccacacagtttctctccccatgtgctgccaaggttttcagtttcctgggtagccttccaagaataggatgtaggtgtgtgtgtgtgtgtgtgtgtgtgtgtgtatattattttctactcttgtcctcttaaaataaagccagctgttagaatactataaatactgtttctgcatccttcaaaagatggttcttttgaagcccttttccttggcttggcgagggcagaaggaaaagcactcttcttcctccttcataagaaaggaaagactaaaatgcctgtgtgtgtgtgtgtgtgtgtgtgtgtgtgtgtgtatagcactcttctccctcccttataagaaagggaagagtaaaatgctgtgtgtgtgtgtgtatatatatacacacacacacacacacacacacacacaggtgattattttctgtattagtagttaaagaactgtctctttttttttttttttacagttgcatactattctgttctaaggatataccataattcacttaagcagcactccaattagtgagcctttagtttgtttcgacttttggctaagataagaaaatgtataactttgtgcacatcattttacacgttgcaaatatatctatgtgataaattcctagccgtcgaatggctgcgtcaaactggcatttgtcttgttagtacattttgccaaattgctcttcatagaacatctcgtcagtattaggaaaggtttcttttccccatacccgtgcccactcagtgtgttatcaacctttttgatcttctaaacaagaaaaatggtgatatctgtcattttaatttgaattctttattcattttgtgagtgaatttgaattttttcatgtgttgcagaatcatttttatttccttttctatgcactgtttgctacttttttgttttttgccaatgttctcttttgggttattggtctctttcttactaaggcaaatatagtttacaacttgaagtaaaaacatggttttctatgataaaggttttaatgaatgttttctacaacagacagattctagtcttaaggttataacctgaaaacatcaaaactaacctttgaattgcataggaatggtctttgctcttcttagccatcaatcctggacagaagttcaacatgatgacaaattgtagcacaagtagagatttaaaaaatttttaactaatatgtaaatatttgctttcattttcttatttatctaacaatacattgatggctagaacagggtttgtctttgcaaagagcctgtgtcaactgactcccattctttcaaaatacattacctaaagaaggtttgtggcttctctttgcattgcattttctagccaaatctgaaataactatctggaagcttaacattttattcccacacttatttttccttgtgaaaatcaaaactgcactttcccagtcttcatgagtaaccacaatggtttgccatttgacttgccagttgtattagcatactgagatgtaatttatctgcatcaagagagttaattctgagcagctgggggctttctaatctctttacccatcttggacaccagttccctctcactgctatttgttttattctttgcagttagaataccattcctcttgacatacaagaaacaaacccaatagaaattaaaaggttccaatttctattttccattcaccaatattataccattttctcctaaagcagttctactctctcctagatcattctcttgcttttgaaataaaccttaaaaagtcattttgtcaccctaaatatgtttatactttcttgaaataatgcttttactgcatattagaattttagtttttacttagcagtccttcactactcctttagaaggaaatttagataatactttgaaggaagttatgagagaacgtcagaagccatgctatcagttttttttttttatgtactctaaagaaaactctgctctgcccatgggtgtcatctctttctgattctgtgtggaggagaaaaatgggaacacttccaatcattttcaaacaatttctgcttaagtggatgaatggaccacctggtttactaactataatgcccaggggatggctttgattggcagacagaacgcggtgcagaaacaatggaagttaaatgaggaaggttttaaacttgcaagttacctcccttggtggcattgactgttggtagaaaataacacgttgggatttcagatacattcagacatgctctgcacttgcaatttgcaatacttaaaacaacacaattcttctaatcataactttttaaaaaatttggccacctttctccattgtctcataaagctatattcatgaagctgtttattcacaaagtcgtatcatttaaagataagtgttatatccataagtatgtaaatgaattaaaatctgggaggctaacacttatccattccttattctactatatcctatctagagccatgcttcttaaaatttaatgtgaaactgttatttctggtctgtggaaccacagtttgaaaagcactgtcatagattcttaagtagatacattttcatgcatacaataaatatgcaggagaagttaaatgggtatgtccgggagtcaaatattgattctcagaatgaaaacttcttcatttatttctcagtgatcttcataaccctttcccatactgggcagtgagaaaaaattatcatctcactctgaaatagtgatttcaccagtctctttttatgggttgggacctcatggataatgaccagtcttttagatttccttgctctcctcctgctcctctccaaaatggcagctgggttgacagatgaggaagcattatacatgacctgagatctctatgcaggtacttgcagtctcctctgaccctctgctctctggaacagtgcctcttgtctgcctgataagtctctaccctgctgaccttgtggctctgagcttgtattttcatcaggaaatacggttctctgctgactatatcagttactaaagggattcttaaatctctgagttactgctgaagaacacttagaattctaaatttgtaattatgatacctctaaaaacaagcgtgattatccattatgtataaggatgccttccaaaaagttggagcaacttgaagccacttgttacattgtcatttagtggaggagggagtgaacttggtgtttacaggtagaactctctatcaggtgctgtgaggaaaaacaaaagcaagataaactgtggccataatctttgttactttatttcccaatggggagaaaaagacaaatatatatatttgtcaaaactgaacagatgttatttgaacattatactgtatatgccattataactataatgtatataatacatatatataaattattgaacactaaaaagaacactttaagaattatctattttattttttttattatactttaagttttagcattaggagaagtatctattttaaataaagctatttcactcttcagtttccatctcaagaactcataccaatttaaacttccactcatatttgagagttgagaaaaattaccaaatgataataatatattatctaaaaaataatttaaagatgcatgtctctaacaaaactatgtaacattctgaagggttttaagtaatacttcatatatcctaattcagaataaacttagatgttatcagtatgaaaatatatcataaagtaacatgattctctccaatgaagatgtaatcatccaaactttatgcgttgaatttacggcttagaaatgccatagcaatatgtcctcttgaatatacaattctatatactgagatttcacttagtatattaagttctgtatcactgaagagtatattatgattctaattaacaaatacaattctattttatataagtacccctatcatctactaggcaaagttagctgatgttactatgcatttttttgtcagctgtactcaacttataataactttgtattccaaatacttcaaaattgccatatgcttactgttttcctattcacatcattttcccccctattcttcctgaccctcctttgagcaatagtgtcagtgggattagactcatgcattcacatactgaatgaatgaatcagtatgtgattcatgatatagaaaatttaaattccttatatatttcatatatcatatatatgatatatgtatctgtgcatataggggatattaaacacttctctgtatatatctgacatatattttgaaaaggaaacaccgtagggccaagttaactgcttcaattattacttagtgtaaatgcattcagtttgttctgtaatttcaaaatgatacatataaaaaagtagagtttgcatgtttaatacatctgaagctacagtttccaaattctgaacactttggtgacccccttgacacaatgaatatttggcagttaccgaacataacagggcacaaataatatagttaatgaaaacatccataattatttaaattaggctattttaagaaaagttttaatttgaacattaaacagcttaaaatcatttataataattgattatgtaacatgctggtcattaaaatgagattggtattctctttttttttttttttttttttttttttttccgaggtggagtcttgctccatcacccaggctggagtgcagtgctgcgatctcagctcactgcagcctccgcctcctgggttcaagggattctcctgcctcagactgccaagtagctaggattactggtgcccaccaccacacccggctaatttttgtatttttagtagagacagggtttcaccatgttgaccaggctggtctcaaactcctgacctcaagtgatccgtcagcctcagcatccgaaagtgctgggattacaggcgtgagccaccatgcctggccaagattggtattcttgacattaataattttggtaagcattaagaaggcaaaacatggaagcactcacaataatgtataggatccaagtaaaattctccttactgaaacatgaaactacaaagccatgtgcgcatacttttaatttttaagatttgtttgaaggaacttttgtgaatgacaagtagagaaagtgtggatagatagcatctctgtctttaaaattatttgatgaaataggtgataagaaacacaaaaattaataattcatgtgacctttattacaatacgtcttctggtattagcatagtaataagtattagtgatttacataattggagagataacacaaatacaaattatgcacacacacatacatacatacacgttcctgtgcttcactcaaaactgaacagatgttatttggacattgtactgtgtatgccattgtaactaaagtccaatttgttagagatagtattgttattttattatctttagtatcttcaatgagtccattatgaatagtagcattaactttgcttatgactagcttaaatagaactttggactccataaaaatacgaacaaagatttttaatggctttagaatacagaagtaatctggtaaaagtattcttgattttaatagaaaccaaacaatcaatgtgcccgttagattaacagtgaataatcagattgttccagctcttcactaatgaacaatgctgaaacaacattctctgtaggtctcctcagatagacatatgagaacacctagaagtggaattgttacctcattagagtattcacatttttaattttatcatatattgcaaattgcttttccaccagcagcaagaagtggcaggaatttattattttaatttgcatatccctggttgaacaagttttcaagtttgttggacagatttttccttctgtgagttgactcttcatatatttaccccaattttccgttggattgtttactttctcttaccgattaatatgagttgtctgtatattctagattctagtagagttctggattatatgcacctaatatataagtctacaattccttatccaaaatcttatcgttgacttttcaggagactagtgaaaatggctacttagtggaacatatggaaatcatgagttataagtgtataaaggctaagtgcaacagtctaaagacctggtatcacagatgaagactgacatattgagtaaaccaggaattggctttattacataatgtgtcctttttcttgatttcagaaacccatatatttgctgtttcctgtacatgtttaggaagagtattcagaagagagaatgcagatatattgttgctgtttttttttaaaaaaatacgagtttaattcaattacccatttgattgcttgagtttattagttatggtagcacttagaaagagttgttttagataatgactatgattttggtacagaacctaatagtaaaaacaaaacatctttaattttatttaaagtgcatgtcagtcatgaagtcagaattgaattgctcttttctttgcttttaatgaaaattagcctaatggctgttttatctttaaaaagcaacttctagtgtttaataataacagatttaagtaaatattctgttaagacttaaagaaccatgtccaattactatatggataataacttagagatgctctatattggtttaaaataatgcaaatatcactggccactattcagagatatgtcaaaatcacttttgtttaatatgtgcctttctagtccttagatctactgtattccctaatccttttggggtatataatccagagatattaggacccattcagccagaaactgaaacatgccatgatggttagaattcatcagaaccacactcaaatgaatgttaagagacatagcgtgataaaagtgcatctgaaagagtatatgaacagatgacattacatacaatgttgtatataagagaaaggaaggaaagacattcatatcatgtcatattaattcatgtacactgaaaatacagaccgtgaacagacattctttcatttgttccttcatgtattcaataatagaatgcttctctaccacagatgattccaggggaatttggcaattgctggagatatttgtggttgtcacacatgggggaggagaaagtgctactggcatcttgtgcatagtgaccaggcatgctgcaaaacaccctgcagtacacagggtagctcccgacaagaaataattatccagtcccaaatggcaatagggctgaagctgagaaaccctgattgaaactcacattacatcctaatcgaaactactttgttccgttctgagccgtaggattcatcaaataaaacctactttttattggtacaatatttaaatccagagaccctgtagcatagtaattatgtatgcaggatttgcctcagaaagactagggttcaaatctcagattcaccatatgttaggttgtgccctaggcaagtttctgacctttcgtgactctagttttttaatctgaaaaaatggtaatagtattgctgagaggctctgcaatggagattgagattaattaagatgatttatgttaagtgcatagcagagtgtttgcacttagtcagtttccaacaaatggtagcagtattacctttacatgtactaaatcatttcatcctgacctactatgaaaagcctgatcactttccatattttactgtttttaagataccattgattagagtatgcattgttattttatttttcaccaagaaaaatgtgctgccgttttagactatgacacgctatcatttataaaacgtgtcccaatttcagagcagctaacctgttgaaataaaatgtgagtcttataattgattattgtaaaacacaacagtaagtcttctttgattaggtgcaactgaacaatactatgaccacattcagtagcaaaggcacttagaaggatataggaatatagcttagcaggaaggtagcatcgggtatctctctttagtaggatgagtatgcgtagcaatctctgaagcacccagggagccatccaagagctattcactttgcagcacctgtccactctctcatgacatctcaggtgcacaggaaggaaacaaatcgagatgctgggtcaaccctggcctagaagccttatgcatcccagaggccaatgccttgtaacatagtttccaaggtcctcaaaaaggacatgcttagttacaagaattgttgtacttggggacgccccacaattatggttttccattaggtatttatagttcatatgtagaacacctaaccaaggtgtaatttaccagtccccatcatttttttttttaatctgaagcaatgttgcctgctcacacatttgacattccaactttatcagttttctagggagaagggagctagaaagttgatcaaagtacaaattctcatacagatggacaaagggtgtttttaaccctttactcacagtaatatctgttagtttcatttattttatatttaaagatactgaaacctgaaacttagagcagttaaatgacttgccccaactcatgggctaataagcctagaacccagatgttcttatttctagactgattatttccaacaacactgtaatatcctaaagcaagagtcagcaaactatggtccaagggccacatttagtcctccacctattttcagaaataaagagttattggaacacagccacatttatttgttcatgtattagacctgactactttcatgccacattggcagaatttgagtttggcccacaaagtctaaaatatttactatatggtgttttatagaaaatgtttgctaacctctgctctaaagtataattacaaattggccaggtgcagtggctcacacctgtaatcccagcactttgagaggccgaaatgggtggatcacttgaggccaggagttcgagacgagcctggccaacatggcaaaaccccgtctgtactaaaaacacaaaaattagccaggcttggtggtgcatgcctgtaatctcagctactctggaggctgaggcacaagaaccgcttgagctggggaggcagaggttgcagtgagccgagatcatgccactgcactccagcctgggcgacagagcgagactgtgtcaaaatagtaaataaataaacaaataaattctaattataaattgtttaactctttctatgagtctatataaggagtttatagaaaagcatttgtttctaatgtttgattattaaaaatacccctgtattttttattttattttaattgacaaataataagtacatatatttatgaggtacaatgtgatgttttgatatatgtttacattgtggaataattatgcatacttgaaggattttagagccacagagcctgaacctaaccgtttctctacatcagtgttggccaacttttttctttaaaaggccaaatagaaaaatttcagtcagtttttgaggcttcatgggccatttggtctctgttggaaatagtcaattcatgctaggattggaacctagataaccagactcaagagcccatactcttcaccagtaaggacttaggaaggcagcaagacctgggagtaccagtttaaatgaatgttcttctaagcagtgtcctgtgctgctattaaaccagaccagagctttggcccttagttaagaactgtatgtataaagttttccaaaataatggcttcaggttttcacaaagtccttccatccaaacaatgcagattgtacccccttaagaatctgttcttaactgccatctgttctctgcattcttaaagtctaatcttaatacagcagccagaatgatctgtttaaaaataagtcagatcacatcactcctctgctgaaaactctcctatgcttcctaatctcactcaggataacagccaagatccttccaaagatgcaggacctatcctcctccatccccaactctatgactatcattcctactactctccccttgctcactagattccactcaccctggtgtccttttttttttaattgaacatacacatacactcctgccccagggcctttgcacttgctgtctctgcacagattgttctttcctgagatagctacttgaatcgttccctcacttccttcagatctttatttaaataccacctactcagtgaggctttccctgcaggcactttctaaactctccacatgccacctccctttgccccatacctaagtctcttattcctatccagtgctttacattttgttctttagcacttttcactctccaaagcaccttaatttctcttttactacacattatcaccattagaatgtaagttttatgaggacacaaaaagtttgtctgttttattcgctgttacatatctagtacctcaaacaatgtttagcagacaataagtaatctgtcaatatttatggaatgactcaagtgattttttggaagagttttggtaatatttcatttgccaaaagaattctgccaaaaagactttgaaacccccactttaaggtggagagcttccatagaggcttctggatgttacttgatggtcacacctatgcccactctttcactggccttgaacatttcaagtatgcagcttagtagattatatcttcacagtttcacaacactttccagtttaaaaatcaatgctgcattatgctttgtatatttggacagattatttttgaaatccataaatctctaagttttttttttttaagtctccctttggtgagctgcccttgattagttcaaaatgggaagagagaacctgtcattctttgtcaatcaggttggcacgtacttgacagcatgcagttatagtgaaagagagctgtgttgcagtggtctagcaaacctaattgtagttaagtaaaagaacagtcacccaacatgagaggaaagacaaagaaactcaactgaacaatgttgtgtttttccatccatcagccttcatttgtcagagtctgactgacaatctggactgcagaaatcaggctctaacacaatattgattccatttcatattttgtttcttgctacactttttagcaaacagtttctgtatggaatgagagatagtgcagtcaatatatgcgaccagggcacatttatattaaaggcttactttggtttttttgtcccagaaatcacatattgtttgtttgttttactataatattgtaattgtcagctcttgctgcagtaacaaacaatgacaaaattccagtgacatataacaacaaacatttattactcactcatgtgtctgcagatcagctgcagctttactccacactatgaatcaagttaaggtcttttcattctagaatatggatctgctctaaatgtcttctcatcccaggaccctagcggaaagagcagcttttatatggcatattattctctcatgatggaagataagaacaaggggaaccagcaaatcttgaactgcctttaaagttccagctaagagctgccacacagtcccttctgtctgtccatggtctattggtcaaaggtacacagtcaagcccaaagtcaatgggaagggaagtatattcactgcagggcagccatattaagagaggaaatgaataataatgaactgacaaatcaaccatagtatccacaaatgtcttaggatttcattgattcccaaatgcattttttagtatttcaacacctctgaacttgagatatatcgtacaatagataatgtttacaaagtgtaggtttttttgttttttggctttcttagtttacataacaatagtggcccttatcatcaatgatagattagatagaaaaactgttaattgtggggttgacaaaatagccaaatggtagaaggcactccttataagtaagtaagttatgagtgggagctaagtgatgagaacacatggacacatacaggggaacaacacacaatggggcctatcagagggtggaggttgggcggagggagagaaccagaaaaaataactaatgggtactaggcttaatatctgggtgacaacataatctgtacaacaggccctcatgacacaagtttacctatgtaacaaacttgcacgtgtacttaaaataaaagttaaaaaaaattaagtgaatggacacttaatgtttacaaaaaagttgtcatttttatcttgaatttcttttttctgtagcaatatttatatctcattcagatcagcttatttgattagaaaaccaagcattaatagtagatcttatgtctatttattcacatattcatataccttcatttataaatatatattcatatatatttagaagatcaattggaaaacataagtgccattcccttatttaaaactcttgtagcttctccactacagttctgagggtggtatacaagatccttcttttctctggcttttgctttctatttctactccattacttcccattcccctacgtgatagctccgtacttcttctgcttcctgtctttgcatgttccatgttccctcttggaatacattctctctgccgtccatccccttataatgaggtgcatgagctgtttctgctcccagcctttctgtcctgaccttcttgtctatcaaacacaaaagtgatcagttcctgctctgtgctccattatacattgcactttactagttgttatacctgacctgctctaaatgtagtatatatttgtgtgtctgcactccccattcctaccccagtgaaacatagtaagcactgaataaatgtttgtcgaatgagcaaataaataaataaataaataaataaatgtttgaacatacatggaaaggttgtttatgtcctccttataatgtgctttgagatatatattcttaatatatatataatcatatattctaaggttattagtaggtaaaatgaaaatttaaagaaattgagtacaagaaaggaaaacaaggaagaattttttcctttttgtactatttctaagaacaccaaatttctagttaaacacacgcacacacaatcggcatgatgtagaattagaaatatgttgaataaatcaattattagaaaatgtaaatatatattaatttgcctctgacttgctacttttaccctcaagggttttttttttctacctcttttcatcactaatctttgcttcactgcttgtcagatcagcaactgcccattattagtaatgccatttaataagagataaataaaagtaaaggtgcttagagttactccatttcaaaaacctatcagggctggatttcagaagagaccatgaaattctcctactgttattgaaccattactccctattacctaattaatacaagttattttcttaaaattatacctgacattgtagtgaactatcaatactatgaagaaaatcaaactctcctcgtatcataaggatcttaacacctggtacacaatcttgcattggaggggacattaagaataaggcatggaggaaaaaaaaaccttaatggaaatgttctgttattagaaatgagactttttggtggaaatcccatgacgactttcttgtctgaatgttctttgaagttgaacactttctccttacacaagccggccactataattagctatgtttccattttagtggtggccttcttcaccttatctgaaatcatataaagatgtgaggccatttgcgagataaaaggtttgctcaaaccagttctctgacctggatatcagaggtttggcaatcataaacccactaagagaaaccctcagagctattacaaggctatgtaaaactttatttcattttttgtgagaagggacaggattttctctcatttatattctggaagaatattgtagaatgtatttgagttcaagaggaggagaaataattaacataatattaagaaacgtcaattttggaaagaaataataagcatatatgcacatgtgcgtgtatgcacacacacacacagtatacacaacagattcagaaagaaggaaatagagatttggtgacacatacttcctggatataatctcaactctgccatttgcaagccacatggtcttggataattgacctaatctctctcaattgcagcatctgtgaaattagataaaactttctttgtaggagtgtatgtgtgtatgaaaagcacagtgtttgacatataataaatgttttagcaactgtagcttgttaatattatcacagcagttaatatcactatagcagttagttgccattttcagcacagctaataattttagtagcattttctgatctttccatctcatgtggtttctttggagttgtttcttgctttgttttttagcttttctatgtcacattttatttgcatggagaaataacaaattttacaatttatttcacatattctttaatttttaggataattgtcagtttcttacagtttattttccttatactcactgaagaaaatatgtacgaaagaatattttcagtgaagttaattggatttactacagttgacccttcaagcaatagtatcttgcccttaataactgacctatctttgaactaataaattcaacctgcaaataaatgtagtgaggtaaattgtagaaatttatcttcaaaatggtctttctaaagtgatctatcaaaggtgcatttaattagaggtccagttctccaaaaatgtgccaaggaaaagtagccacaaagaatttagagctgaaatgaattctttcacccattgctctgtttctatagaactgagaataaatctcatatgggtacttaaaatctgtactatgtcattgaaggatgaaaagatgacaatagtgatgatagaaggacacggtaataggaaacatttcaatagagggaaatgatgtgagtatgcaatgttcattcaccagaggactaaatctagggctattttggtgacttgaacagggaatattctacttcctgcaagtgaaaaatatggacatttcatttggcatgccacctgctcttcagtccatcatgtagcaagcacccacttagtactttggagctctaagtaatacttggactactcaaatgccagccttgttgccatttctgtttattcgccaataacaattttattaattaaaatttgtatgtggatgtcttaaggaaattccttgtagttgtcaaagcagactcctgatcctatctatctgccagtgccttctgagtagtggtatctattcttcatgatttttggaactatttatgggtgattgaagaatatggagtggatagagaaggatgctagtcatttggctgcacacaagaaacacagatgaaatttttgactatttctgttcattttctaaaggtacagaattttcactggattgtacttgtaagcaattttaaaggaagaaatatccagccttttgaatttgttacagtgttgcaagacttttttaaaatgttaagaatttttatcatataggatgaattaatactctcataattttaggtttgtttcttccataattaataactatccttaaagattgtgtgtgtgtgtgtgtgtgtgtgtgtgtgtgtgtgtatttcttgattttccagagcaaacgttcccattcatttgttttactcaccttgttatagttgctcccattgtaagatatatctagtaagtttactgttgttacctaaatctgtttgctgaattttaaaaatgggaacatgtagtaaatttgggggaccacgagctagtatttacaaagtaaaccgagaacattggatataaaaccttatttcatttaacctccaatgaaggatatattcagtattattatttgtattatttcttgagcttccttgcttatctgtaatatgtaacatggtggcaccccttttcatataattctctcctcacttctattttgggtttttacatgttcttgtttcagtctcttctgctctttctatcttttcttggttcaactttcttctcttatcctgtggaggcgaatacctaattctggctctatcctcttcagtcactctacaagtatcactgggacaatattgtccaactactatttttacctccaaacctgtattcttagccttacccctaatctgcacactacgcttctttttgcaattactttctgtacatttgcatcagtgttaatcacaggcatcttgactcatgtctccaacctgaaaacattattccttccatatagggacaggctcctctgtcttccctgtacccctagacagtttctcccaagttataaaatcttggtgattctgaaaattttctttttccccatcaagtcctgccagtcctttatccacaacataggaataatacttcctgaacatccgtgctgctcctgtttgttcaataagtactcggacctctaaaggcatttcctatgtttcttccaccagccccttatccttaaaatcttgcctccaatctgccgctagagttatcatcttaaaagagtcaaatcagggttggtatccaagaaatattacaaagtactaagctcttggtatatacaatcaacttgagagaaagagagggacgggaggagagggagagagagagagagagagagagagagagagagagagagagagagagagactttattctgtcctctataacacctgaatgattctgtacatatttatgttaacagagcattgtactacttcaaatccttatacaagcaaaactcctcaccgccttttggcaatggaacttgcttttccctctgcctgaaatagtcttcagtatgttgacatgactcatttcttcacttcattccatttcctgaagagaggagcagtcttctgtgctcacattgcctaaaatagagcccactgtcactctctacttactctttttaatctttcttcatagcatacatatacatatatatacacacatatacatatatatacacacatatacatatatatatatatatgtatacacatatacaggcatacctctgagacactgaaggttcagttccagaccaccataataaagtgagtcacatgaactttttggtttcctggtacatatagaagtcaggtgtacactacactgtaatctattaagtatacaatagtgtatgcctaaaaactaatgtacatgccttaatttaaaaatatgttattgcagtgttcaagctgagagccaaatcaagaatgcaaactatttacaataaccacaaaaaataaaatatctaggaatacatctaaccaaagaagtgaaagatctctacagggctaactacaaaacactgctgaaagaaaccatagataacacaaacaaatggagaaacattccatgttaatggaaaggaagaatcaatatcattaaaatggacatactgcttaaagcaatctacagattcaatgctattcctatcaaactagcaatgtcatttttcacagaattataaaaaactatcctaaaattcatatgaatctaaaaaacagtctgaagagtaaaaacaatgctaagtgaaaagaataaagcatgatattaaccaacttcaaactatactataaggctacagttacccaaagagaatgggacttctacaaaaacagaaacttggaccagtagaacagaatagagaactcagaaataaagccgcatacctacagccatctgatctttaacaaagtaaacaaaaaaaaaaaaaatggggaaaggactccctactcaataaacggtgctgggatagctggctaaccgtatccagaggaatgaaactggactcctacctttcactatatacaaaaattaactcaagatggattaaagatttaaaaaaataaaatctcagccaggtgcggtggctcacgcctgtaatcccagcactttgggaggctgaagcaggtggatcacgaggtcaggagattgacaccatcctggccaacatggtgaaaccccgtctctactaaaaatacaaaaaaattagctgggcatgctggcgcatccctgtaatcccagctacttgggaggctgaggcaggagaaccgcttgagccagggagtcggaggttgcagtgagcccagattgcactgcgccactgcacttcagcctgacaacagagcgagactccgtccctaaataaatacaatacaatacaataaaatctcaaactagaagaatcgcagaagaaaacctaggaaatactattctggacatcagccttcagaaagaattcatgactaagtccttaaaagcaaatgtaacaaaaccaaaaattaacaagtgggatctaattaaactaaagagcttctacacagcaaaagaaactatcaacagagtaaacagacaacccacaagatgagagaaaatatacacaaactatccatcagacaaagatctaatatccataatctatagggaacttaacaagcaaaacgcagataaccccatgtaaaaagtgggcaaaagacatgaatatatagatacttctcaaaagaagacaaacgggtggctaacagatatgaaaaaatgctccacatcactcatcattagagaaatgcaaatcaaaaccacaatgagataccatctcacaccagtcagaatgcctattatcaaaaactcaaaacacaatagatgttggtgaggctgcagagaaaagggaacattatacgctgttggtgggagtgtacattagttcacccactgtggaaagcagtttggggatttctcaacttaaaatgcactgtcattcaacccagcaatcccattactgagtatatatccaaaagtaaataaatcattctaccaaaaagacacatgcacttgtatgttcactgcagcactattcacaatagaaaagccaaggaatcaacctagatgaccatcaatggtggactggatgaagaaaatgtggtacacatacaatatgaaatactacacaaccattaaaaagaatgaaattatgtcctttgtagcaacatgcatgcaactggaggccattatcgtaaatgaattagtaggaacagaaaaccaaataccactttgttctcacttataagtgggcctaaacattgggcactcatggacataaagatggcaacagtacatactggaaactagtaggggaagagataaggaaggggcaagagttgaaaaactaactattagatacggtgcgcactatctcagtgacaggatccatcatactccaaacctcagtatcacccaataaatatataaatgtaacaaacctgcacatgtaccccttaaatctaaaacaatagttgaaattatttaaaaaaatactttgttgctaaagcttgctagcagtcatctgagccttcaatgagtcttaatctttttgctgatggagggtcttgccttgacggagatagctgctgaccgatcagagtagtaactgttgaaaggttggagtgactatgccaatttcttagaataaaacaaccatgaggtttgctatgttggttgatttttttcacaaaagatttttatgtagtgtgtgatgttatttgataacattttacccacagtagatctttcaaaaatgaggtcaaggctctcataccctgctgctgctttaccaactaagtttacagaatattctaaaccctttgttgtcatttcaacattgtttacagcgtcttcaccaggagtagattctgtctcatgaaaacactttgttttgctcatctataagtagcaactcttcatccattgaagtttcattatgagatgacggccattcagttacaccttcaggctccactttattctagttctcttgcaattttctccacatccagtgacttcccctactaaagtcttggaccctcataggcattcatgagggttggaataaacttcttccaaacaccttgtaatgttgatatttacctctttctatgaatcacaaattttcttaatggcatctggaatggtgagtcctttccagaagattttcagtttacccagatccatcagaggaatcgctacctagggcagctatagccttacaaaatgtactttttaaagaataagacttgagagctgaaatgactcctttgtccaaggactgcagaatggatgttgtgttagcaggcataaaaacaaaatctcttggtacatcttcatcagacctcttggctgaccaggtgcattatcaacaagcagtaatatattgaaagagattttttcttctgtgcaataggtatggccagtgggcctaaaatattcagtaagtaaaccatgctgtaaagagatgtgctatcatccaggctttgttgttccctttatagagcataggcagagtctattagcataatcttaagggccctaggatttttggaatagtaaatgagcattgtcttcaattgaaagtcatcaattgcattagcccctcaaaagagagtcagcctgtcctttgaactttcgaagccaggcattgacttctctctagctatgaaagtcctagatggcatctttttccaatagaagactgcttcatctacactgaaaatctgttgtttagtgtagctaccttcatcatcttagatattagcttgatcttctggatagtttgctgcagcttctccatcagcacttgttgctccacctttcacttttatgttacggagagggcttcgtcctaaagcctcatgaacaaacctctgctggcttccaacttttcttctacaatttcctcacctctctcagcattcatacaactgaacagaattgggccttgctctggattaggctttggcttaggagaatgttgtggctgttttgatcttctgtccagaccactaagacattctccatattaacaataaggctgttctgctttgttatcatttgcatgttcactagactggcacttttaattttcttcaagaatttttcctttgcattcacaacttagctaacgggcacaagaggcctagcttccagcctctcttggctttcgacatgccttcctaaccaagcttaatcatttctagcttttgatttaaagtgagagacatgcaactcttgttttcccttgaacatttagaggccatagtacggttattaactggcataatttcaatattgttgtgtctcagaatagggaggcccaaggagaggaagagaggtagggggatgactggtcagtggagcgttcagaatacatacattaatggattaagtttgccatcctatatgggcactgtttgtggcaccctgaaactattaaaatagtaacatcaaagattactgattacccatcaccataacagttataaaaatattgaaaaagcttgaaatattgtgagaattatcaaattgtgacacagagacatgaagtaagcacatggtgttggaaatgttgctgatagacttgcttgatgcagggttgctacaaaccttcagtttgtaaaaaaaaaaaaaaaaaaaaagcagtatctgcagagccaataaggcaaaactcagtaaaatgaggtatacctgtacatatacatacatgtgtctatatatccactcacacatatgtgtatgtgtattatatgtgcatattatacatatatgttgatatgtgtatttatcatatctaatacacatatatgtatatacatgtatatcacacacatatattcatattgtaaattgaaaattttctagtgctgtatcccaatctctagcttataaatatattgaatagatgatgcagcaggtatcttttgaatacgcactccaattttagaaatataaatcttttttaaaggttggaataatataagtagtttggtgttcagtgcaaaaggttttaatgtataaatactatgaaaacaaaagttagatcaaatgtatcaaatacaaatgatctgtattgggggacagagggacacattaaatttaagggaatatgaggagaatattgacttcctatgctcgatgagtgaaaaagaaaagtgaagtgggagtgtttgaaaggaaagatgagcttttccatgctagtacatcacaggttttaatactcatagaagtttttagatttgtataggaaatatgatcctccagcctttccaagtttactcttctactggaattacaaatcaaaactaataaatgtttactatgcttcaagtgcaatagttataaagtacctgattagaggtcccacattcagatgttggttatataaaatattcatgctaaatcatataaatgctaaaacatttgtatttgtgatgttctcttggattgctagatggagattaaattatacaaattcagctaagaagaaaaatgtgggataaatggaattttagtttaaaggaagtcaatgaaaggattaattaagtataaaataatcccattttaatttgtcatagaaatgagttttctgagacattgttgtaatcaataacgtgaagatgtaaaattttgcaaaaaaaatcattacgggaaatccaaaagcagaagagtagactctgtatttaactctagcagattatttagaaagaaaatagtctatgccatgaacctttcgactgtctgcgtgaacaaatgtctctagtaatacacactcttaactcaattcccataggctcaaagttgcaacagtatttatttgcccgttcaacggttttttgtttagcacttactatgtgttaggcacttccagggatatgagtgaacaaggtagttatgggtcttactctcatagaggataattctttaggaatggtcaaaactatacatatacacataatgtgattaattgtgatgtgttttgaaggaggaagcaaaggagttggaacagtttaaataagactgtaggttggcagtgggaacaatggtctttgctatcatttttcaaaaattccaatgaatgggaatgacgactgttgcattaagttgcctgtctccctctgacccatagtgattctctattatcagagaggtagggcatgtttttcagcatatgtgataatatcaaacagattcagatggtgaaagtaaaatttcttaatgcttagaaataacataatttgatcaaatcatttggatatgttattaagttgttgtaagatatgaagacgtagctgttactactgccaatagtataaactttggattcagacctagctgtgtttgaatattaactctcccacatcccacgaggttgtgggcaagctattcacatcattgtcactaccgtcactactatcccacccacccttgcttcattttcttatctgtaaagtggcaatctgttggaatcagggttggggaaggcaaatagtagtcattatacgaatggtaactatgctatcatcaataatatagtctacagctatgatgaagctaatcagaaaacattgtctattaccagtaattagctatatcaataactatcacaagaaaagtcccagctgtcagtgaataaatagaaaatagtgctttgtcttagagaaacacatacaaaatgaatggtggtgacagtgctttaagttaacttgtcagtttatatgtgtaatgcatatataatttcaaatgtataatttagacattgtacatgtatatttggcctggtaatttatggtatacataaatgataaatgtataggttgaaaattcagttactttttttccttttcttaaatcatttttaccttgctgaagatatgctcttttctctacttccttagaataatatattttattttctcttaaagtattttgagaccatatcaccatttactacaccaaaatgtttttttgcaaatgcggtattcaagggtgaatttatagtggctggggacctatttggaattcagtaagtaaaactagattttccttattcctcatctgagatcagagctatttctacctctagcaaagacatacagtcattccgggtgctgcattttcagggaacaatgtgttttcttggcaaggggcagtaagaccatcaattaatagttcttcatgtaaagtagctaaactactgttataaaggaagtgaaatttgcatacataaccattaacacatgaggttagttatgtacaattttgaccaaagtgcctgtttgctgctggtatttattataataagaactggaaaaaaatagtctatctcaagagcatgtgctgagcacccgtaaattgcaagagactgtactgggcagtatgagattatagtaatttgggatttcctactaatgaactgagagggaacaggtacaaacacagtatacgaaggaaacagtggcacggagacacttaaacacagcagtgctgggaggctccggggtaggggagggaggaagagagatacgggttaatcaggagctgctctctggggaagattgcccaggccctgactgatgcctgacattgattaattgatactctatcctagtgtttaacaagtgttccatccaaaaagtcttctgtaatatttaacttcacttccttcagcttcaatttctgcacaattcttttgtcgtctcatcaagagagctagtcagcagacagtaacaaaatgcttatattcatatacctgaaggatttttttttgtcatgcttcagccttctccagactgaagaaaagcaaataataaacaaaattaatcgttcttcagaaggcctgtttgactcattaataaataataagctttgatactgtgctttaagtgtttaccctttggaaagaaaataattttgacagtgatgtagaaataattatttgatatttatttcaaaacaaaatttatatccaatactaaacacagaattttgtaaaacaataagtgtataaagtaaaatgaacattaggattattgagattattgtagctaaaactagtgtttattcatataaattatgttaataaattgtattgtcattattgcattttacttttttgaaaagtagttaatgcctgtgtttctatatgagtattatataattcaagaagatattggatgaattttttttaagtttaatgtgtttcacatctctgtttcttttctctgcaccaaaagctacatttttgtgcccttatgtaccaggcagaaattgatctgcaatacatgtggagtctccaagggtatatttaaatttagtaattttattgctaactgtgaagttaatctgcactatatgggttcttttccccaggaaactgaaatagcagttcaagctaaacaaccggatgtggaagagattttgtctaaagggcagcatttgtacaaggaaaaaccagccactcagccagtgaaggtaatgaagcaacctctagcaatatccattacctcataatgggttatgcttcccctgttgtacatttgccattgacgtggactatttataatcagtgaaataacttgtaaggaaatactggccatactgtaatagcagaggcaaagctgtctttttgatcagcatatcctatttatatattgtgatcttaaggctattaacgagtcattgctttaaaggactcatttctgtcctggtgtgctgccatcaatacaaaagtagtcccaccttcaaggtagattaaattctttggggctttattgctttgcttgccagccttgatgcttttcatattgtttggtttaattcaaatcaagctactgcatcatagtgtctgtctccaacagctgtaaagaatcacaatatggtccgtgacctttcttttctttgttgctctttcttataaaagagtaaaatcggcattgaggcttcagtattttattgggtcaagaatttttagtgaaatgtcatgtaattgcttatttctttggcaaaaagctggcctgggataaacctttctacttttttttcttctccatatccatgttgaagtctaggtcacatttattcacaggctattacataaggagggagatggaaagccaggtcagttttcaaaaaatagctaatcaatggcttccatttgcaaatgagagtccagtgctaaatatacgttagcagtaggttacctgattctctgtacctgaccagaattataatggctcccattatgatgaaggttcctgagatcctgtaatcatggctgtttattgatcagtcttggtttctcagttaatgttgcaggcttggatacaatgaacctcgtcctcatgtttaaaactgcttgaaaacagttcaggtcaataacctcattatacagaaccagtttgtccttgcaaacaacattaccatgacttagattctgtctctaaggtcgctgcttagtttcccttgcgcttggcccaagcttcatttctagaagattgtttgttttccttacagcttacaagagacttttccttaggtagagttgaagtttgcacctgagcttaatgtccaaacaccagacactgaaaatcacaggtttctctgtagatatcaacatacttttattcagaaatatattgcaaccactccaaaaatctagaaaagtagtttgtatccagttcaagcccagtataatcatttttcataagctaacaatgtgctcagtatttagttggaagagctaggcaaagtcctgaaagcagcaaatttcagagtttccgttgatgttctgaagaaagccagccctcagagcagttaatatggtgactttcattgtagcaagccatgcagtgcacaaatggacaattgcatacgtttctatctactctttgttgatcctcaaagactttatgccttatggtgtatgactatgaattaaggtttgtcactaattgttagagatcacaaaggtacatgtaatttggcttttacttttgtgcctttgtaaaagagagagagagagatcttaattaaaagccactgagaaaatttttgctttcattatgtataaaacaatccaaatgcttgatgctaacttatcgcacctccacccacacactcaactactgggccacttggagatcagaactgggatctgccatgcctgagcatatctgcttcctgctgatgcattagtgatgtaaaaggagaattacttttctgaaataaaaagaaagaaccaggagctgttgctttccttctctttcacaacccttaaaaccatttttgtagcagacagcactgtttttttccttcctttttttttttctccttccctgtttccctattttctctcaatttgacacattgggagaagctgaacttaagggaaaatttattcctgtcttcccatttctcccttggatttggagaaaaatcaacatatcaagttggctgggcatggtggctcatgcctataatcccagcactttgcgaggccgaggcaggcggatcacctgaggtcaggagttcgagacctgcctggccaacatggtgaaaccctgtctctactaaaaatatgaaaatgagccagctgtggtggcaggcgcctgtaatcccagctacttgggaggctgaggcaggagaatcacttgaacccgagaggcagaagttgcagtgagccgagatcgcgctgttgcactccagcctgggcgacacgagcgaaactccgtctcaaaatatatatatatcaagttgataggggcaaaaatgcaagaatgatttgagaattatggggtttaaaaaaatagttgactcacgcacaacttttgctgtggaccatgaccttggaaacatctgaagattagctggggtttgcggtagcctgaaacacctagaggctcaaaaaatgacctcacagttttgaacatgacacccagcaatacaaggcagaaagctgtgagggctgtttaaatctctgcatggatcaaaaatttatttttaaaggttagagatgatttttctgaaggacactccattgctctgatagaacgtgaacaaagcctttttaaactttgagtccatatatcaaaatttaaaatttgtcctatttataatgcctcttcttcactctgggtcttgttacctcttaatagaagaggaaatgagtctgagtagcctgcagcacattttcatgagagaattgtgtttctgtttttgttttttgggggaggtgcatttggaaactgtaataattatgaagaaaatgatattctttaaaaagaaaatgaaaatctctcacgatgtatatgcaagatctagtatttaaatgcataattagtgtgtccaccgcttacaaacattctaattaaagacacatcagggagcaattctgtttcttaggaaattgacttgtctattggcacctccgcattctgcatcagacagcctgtctgtccagctcctacgctcacctcccaagctgagttctgattggaagctgggttcatccctgctcagtttctttcctctttcttctttccttcacttcgtcaacttctttaagatttcttttattttcaaagatggtatatttctggtttcttttttaaaatctctgactaaccaacttctttattttctttgaggacttcctgtaaaaggtcaaatacatattatgaaatgataatactaatgacgtataggtagtactaatctctgctgcaaaataactggaaaaatcttaggatcgtatgatcaaatacctctccatctttgtttagcacttcaactctctttctctctctctgtctctctctctctctctctctctttccctccctccctctccactctctccctctctccctctctccctctctccctctctccctctctccctctctctctctctctctcccccttcctcccccatctacacacatacttttatttatttgtatgttatttcttcatcttaacttcagaaattactgaagactgactatatgagttatataaattgtttaaaattttgctaaagttatagttttggtataatatattacattaatgccatagatgaaatagtctttaatgtgttccatttttccacacagtaataactaggtcctcaatagcaccccatttagcagtttaaaagcagcaaaaacaactgctatcagtaacaacaatataaactacaaaagaagccatttgttatttgatttttattataaaattgtatttttaactgtcttgagcttaagcatttaggtgccattttcttgtattcatactcatttttaacttaagttggaaaactacactttcagttaacttttaaaaatatgtttatgtactttcaatgcttacatcacctgccatgtattagaactgagagcattaatggaattttaaatgtcttggttactttctaaagtgataaaatgaagccagctggtttgctttgctaactttttatattatcaaaaaatgttacttacacaaacctagtaatatgttttacttactgctcttgaattatttttcaatgtaacagaaaaaggtgtgaggaactttctgtatttggccaaagcgttccatcccaacctttaacacaaaataattgctgtagacaaatggtcaagagggcaattataatcttccaggcatcatttcctcagatatgaactgcaaaatgacagcatcattagtcattttcaattacagtcagtcacaaccagggatgattcattttcccagctgttttgttgttaattaactagatgaagctgtttttttttctcccaatgagtttgttctactgccaacatcaacatcttaacatttttaaaaacttccttagggtttattttttgcctaacaatctttaatatattactcacaaaagatgtgcatctcaagatttatccacggtatagcaggtcaaatggtatttcattggtcgaaatgttgccgaaataaatataattacacttaaaacaatacttggatttcataaatcatctgccatgcgtacaatctcatttacctggtgtaacttcacttgtagcaacagaaatcaatagagagataacagacaaaaattgtcccctgaaatgaacaagtctattttgactgactcatttattgagcacaatttccatgccaataacaccagaataagttgggagaggacttctagaaagaagataacaatattagaggcatttaataatttataagtaaatgcatagcaacattttatttttttaaattacaagtttgcgactgggcgcggtggctcgcgcctgtaataccagcactttgggaggccaaggtgggcggatcacaaagtcaggagatcgagaccatcctggctaacatggtgaaaccccatctctactaaaaatacaaaaacaaaattagccgggcttggtggcaggcatctgtagtcccagctactcgggaggctgaggcaggagaatggcatgaacccgggaggcagagcttgcagtgagctgagatcacgccactgcactccagcctgggtgacagagtgagactccatctcataaataaataaataaatacaagtttgctttacaactgaaaaaaaagtcttggagtataagaggttgaataaatgctaatcccaatgcataaacttgaggagagcttcactttcccaatgagaagagaaaaaatttataatagatttttgggcaacttgtaaacataaacatttagaaatatggatgagattgtcaaatgtctaattatattcaatttcttaattgagtagcatttccatatttgcagtcttacattttataaaataacacactcatttagaaatacctggcacatttatattttatgaaacaatttcattcaaacccttcgtatgtatattctagaattgtagagctcatcaccttgctaagttatttgtaatatggcattgtttgaatccctacataatactctgaaagccctctggccaagattacaagcaacatatctgtaatcaaaaaattaagaatatttaccttattgcagcaagagcgtaaaacacttcagagtgtgggcatctcagtaagagggcattggaaaaagcttcttacagagttcagctggctgcatgattctaaggaggaattcagaaagtagaagccatttctggattagatgctttcaagaaacagagtcaatgtagtgattaggtatcttagtgtttatctagaagatgagattaaagtagggctagacacgtcgttggtaaaggagcagcaatgcctcatattagtcatttctgtgatagcagaaaggccttgtctctgtcttgtttcaaacacggccatggggtggccttgtgtctgcctagtttatttctatgagtgttttttaacatccagctgggaccatcatggcctagctagctgccagctgccagctatcagcagagctatttttcacgttctcaatgctgtcgctgaaatttttatcccaaacttcaatacccattcacaaaatattaggaaaactgtttttttcatttttcttagatatgattttggttgtttgtttgtttttgagacggagtttcgctcttgttgcccaggctggagtgcggtggcgcgatctcggctcaccgcaacctacacctcccaggttcaagcgattctcctgcctcagccttccaagtagctgggattacaggcgcccaccaccatgcccagctaattttgtatttttagtagagatggggtttctccacgttggtcaagctggtctcgaactcccgacctcaggtgatcaggctgcctcggcctcccaaagtcctgggattacaggcgtgagccactgcacccagccagatgtgatcttttaaaaattcccaatagactaacatattctttctgctttttaagttgtttggctttttaacaaattctttgaaagactcgtttacaatgatctctgccacgagtgattgtgaagctatacattaggaatgattgctaaagatttatcaactttctttgcctccctttttaattaagcaaattctgtcagaatacttatgtaagcatcacatctcttgaggttatttcaggctaatatacaacattgtggttccgaataaaataattgagacataagagatagtataaagtcttgaatatgagccaactttcttttctgagagaatatttgagtgaaaagtctcatgtactcagtagctcatgctgaaattagggaagcattttagagatttgaatttcacctcttgtcctcagttgtattagttacacttaaagagagagacaaagagacatagatgtttcagttacaatattcgaatgtatgcctgtatatatacagccgtaggtagagtcctttatttattcagtagatattaattgcatgccaaccattgacacaagatatatttttaaattttgaaaatctcaaactcaaatagagtttaaaactatattctagtttacttttttaaacaaatgattttttatgattgtattaaacaaatacattatttttccttacttattctacatcaaataatatctatttctagaaggcttttttccttgtcttaatgatagaaaacataaaaatcatttaatattttttaaatatccaaaaaatatgaggcaagaaagcagccacaattgtagctaccttaggaaacttaattaaaaaatttttttttatttttaattttatatgtgtataattgtacatatttatttgtgcggtacaagttatattttgcttattttttataatttcagtagttttgggggtataggtggtttttggttacatggatgagttctatagtggcgaattctgaaattttttatgtatccatttcctgagtactatatactgtacccaataaatagtcttttatcccttacctcactcccaagctccccacttagagtccccaaagtccattgtatcactccgtatgtctttgtatcctcatagcttagctcccacttacgagtgagaacatatggtatttagttttccgttcctgagttactttacttggaatagtggctgccagctccattcaagttgctgcaaaagagattcttttttatggctgagtaatattccatggtatatagataccacattttctttatccattcattggtcgatggacacttgggttggttccatatcttgcaattgcaaattgtgctgctatttttgtgctgctgctttcttttttgttatttccttttctggttttggtattagggtgatactgacttcatagaatgatttagggaggattccctctttatcttttgaaatagtttcattataattggtaccaattcttctttgaatgtctggtagaattcagctgtgaatccatctggtcctggacttttttttggcaatttttaaattactgatattcaaccttgctgctcgttactggtatgttcagggtttctttcttttttttttttttttttgagatggagttttgctctttcacctaggctttagtgctgtggcatgatcttggctcactgcaacctccaccttccagtttcaagtaattctcctgcctcagcctcccaagtagctgagattacaggtgcccaccaccacgcccagctaatttttgtatttttagtagagtcggagtttcactgtgttggccaggcaggtctcgaactcctgacctagtgatccacctgcctcagcctcccaaagtgctaaaatcacagacgtgagccaccgcgcccagccaaagcgttcagggtttctatttcttcttgatttaaactaggagggttgtgtgtttccaggaatgtatccatttcctctagattttctagtttgtgtgcataaaggtgttcatagtagtagtgaatgatcttttgtatttttgtgatgtaggttgtagtgtttccagtttcatttctacttgagcttatttgaatcttctctcttctttccttggttaatcttgctaatggtctatcaattttgtttatcttttcaaagaactatttgtttcatttatattttgtatttttttgtttcaacttcatttagttctgctttgatctttgttatttcttttcttctgctggatttgagtttagtttgttcttgtttctctagttccttgaaatgtgacattaggttgtcaatttgtgctctttcagaatttttgatgtagtatttaacactatgaactttcctcttagcactgtttttgctgtatctcagaggttttgataaattgtgtcactattaatcatttcaaaaaatattttaatttccatctcaatttcattgttaaccccaaaatcattcaagagcagatttcttaatttccatgtgtttgtatagttttgagggttccttttggagttgatttttagttttattccactgtggtctgagaagatacttgatatgattttgattttcctaaatttattaagactttgtggtctcttgtatgacctgtcttggagaatggtccatctgctgataagaatgtatattctataattgttaggaagaatgttctgtaaatatctgttaagtccatttgttctagggtgtaatttaagtccattgtttctttgttaagtttttgtttcagtgacctgtctagtgctgtaaatggagtattgaagtcccccactattattgcattgctgtctatctcatttcttaggtctagtactattgttttataaagctaggagcaccagtgttaggtgcatataaattgagtactgtagtaaatatcttcttgttggactaatccttttatcattatacaatgtctttctttatcttttatttacggttattgctttaaagcccattttgtctgatataagaatagctactcctgcttgcttttggttcccatttgcatggagtatctttttccgtccttttaccacaagtgatattttgatacaagcatataatatataatgatcaaatcagagtgattgcagtatctatcaccttaaatatttatccattttaaattttaaaaggaaagctatattcagaaatcactttttcttgtaactaattcctgttcttcataaagcagaaatttcatagtttgatatagttgtcttaacatttaatgaatattttcaagcaaagtatatacaatggagaataatgctcagctgcaaaagtcacctataataaatctgatttttccatttacaaacaaaagaattcccaaagtttatccattttggtagaacacgaattcactctgttgagtttggagctcttgtgcggaaaaccttggacctgcaatttagttagcatattcaaagttttaaaattatggagatgtagtcaagaataggacttgataactattatcccactgatacgctatttaaataagttgggatttaagtacttatttgatttccttaaatttgcttatagatgattaacatgtattgcaaattgttaccttttacagatttctattgagcactgcttaaattttattatatgatgaacacctgactagttgctacagccaaacattttttgttatgcaaatgaattttacagcttaattggaatgatgagagaattgaaaatatgggcaaatgccagagaagtgaaaagcaaaatgaagcaaaacaaaaaagaacttgtataatatataaataatccatttcaactctacagtacaccaaactcttgaaaaagtagcaagattgtttttgtgaacagccaaatcaaaaactgtagtcatttcataagtatttgctaataattataaaagattggaaattatacagttctgagcttattgaacctttgacccattgcagtgtcctcagacatttgtgatacattggtagtgccatttaattttaaaaatccacctctacattagagattatagtaacccctcatttacctatctggaaataagagtgggaaagataatattagagtaaatggacagactatttagagtttatgtattaataaaagagaaattgcatgtacaaacatgttattttctaggtaactaaaacctagtcctttaataaagcactgaaaaaaattttatcgtaactattttaatgagaacttttcttgaatatcttctgttttgcttcattgagcagcgcataatatctaaccaacaaatttatagtgctttgtagttcacagcatttttaccatataaaatatctcgtttagtttctccaacaaagctatgagttaggtggtattattatatccatgtttcaaggatgataaatcttagtgacccatctcattttccaaggatcacacaaccagtagtagtgaattaggaacgaaacctaagacttctgattctaaatcacaatgtaaattaacttttcttaattttcaggggtgtcgttatcacatcaatttttgctctgtttagtgatacagtgttatatgaggaacatgaaattcaaagcaccctttcttcagttgagacccagttgaagtggttaatttgcttttagaagctagactgtaagataaatacatacctttaagtattaaagctaactcaaatcactgagatacttacaccatgagaagagagtggaacctaagtcaactggtagaaacatagaaacagcaaactttgatctctctttatcctcattctgaggggcaatatgcttactgagtggaaagatgggcatacccccagcagtatttaaatcaatccctaatctatcactatctctccttttctctctatctcagcacatataggtgatttcctataaattaaatggtgtaggatgagatttcatcccatgttgaaaggtcatttcattgataaatgactaagattaccacatttctcagttttaagtttttcatgttcattgtctcctattgctactttctgttatcagaatgattacttctcattgcttttagtattctgtctttgtagggttacagaaacttcacagggaaaccagaagatcaaatatattactcactagtctcttagaatatttaatttttagtgtttaggttctgatgtcaggacaggaaaatatcttccgtgagtgatgacttccaagggtggttttcctgactaatcagaggcattattttttgtttgcttttgggttcaagactgatttttaataaataaaaaagttacatttattgatatgctagtaaatatttacatcatgcattctggataaaaacattgaaagccttgatttgacttgatgtcagacacaatagacatagtctcaagagcactgatgatagttaaattaggaagtgatgaattcttactatatattatcttttgttcttagcacagtttattttatatttataaaatttaatttatattaatggttatgtttaataaccgattagcaaaattactgaaatgtgacaataatatctctattcctgtttctttcctgctttatccttttaaaatatattatttataagtatattttaaatttataaaagctacattgtgctataaatcttgtttcttagcttttctaacattcataattgtgttttaaagatccacccatggccgggcgcagtggctcatgcctgcaatcccagcacattgggaggccaagatgggcagatcatctgaggtcaggagttcaaggcagcctggccaacatggtgaaatacaaaatacaaaaattacccgggtgtggtggtgcgagcctgtaatcccagctaccgggaggctgaggcaggagaatcacttgaacccaggaggcaaaggttgcagtgagccaagatctcaccactgcattccagccagggcaacaacagtgaaactccatctaaaaaaaaaaaagaaaaaaatccatccacattgctctacatatacccttatccatttctttcacatacatacccatgttggcctcaattccccacaatgcagcaacaaactttcttgtacttccttatgaccttaagaatgtgagagaaacttctccggtatacactggtgagggaatatgatcagcagggttttttgtttgtttttctgtgttttgctttttaacttatgcccacctttctgttggcagtcagcagccacatctgaagttatagctctctgatttagacaaggcttattcttccctttgttacaacctagtccctatagggacctgaatttgtgaccctagtctatgagattactttttaaatacagtttggttcaggatttataaaagcctaataaggctgggtgtggtggctcacacctgtaattccagcgctttgggaggctgggatgggcagatcactggagtccaggagtttgagaccagcctgggcaacatggcaaaaccccgtctctacataaaaatgtatgtactcagtagtactactcagtagtagtactgagtagctactcaggaggctgaggtgggaggattgcctaggaagtcgaggctgcagtgagccgagatcttgccactgctctcccgcctgggtgacagagtgagaccctgtctcaaaagaaaaaataagcctaataaaatgattgcacgcctggaaaacctacataggctccttcaagtcccatatatatataaagtcatccatggtatgtagttcacattgaagtcaagttgggggaaaagaaacttatttatctctttctcttttcctttattcaagtagcaattttcatttaattttattcaattcagaaatatttactgaactcctcttattaggaagcactagactggatataaagaaaacatcgtacaaggcatagaggactcagtcctgccttgcgaagggcacatagtctgactggaaagacacatgctgacagggtagactgtgttaggaataatgctcaaaatcctgaggacattgaacactcgaacaaaggattcttagcaaagcaattttacttctgcacagaggggtgcctccttggccagttgccatgagagcacacctgaacaaaggggcatgagagcctttattcctgacgcaagtcctgcccctgtaccctttccccccattggctggggttgggtcgtacaatctaaactaatcccagttggctaaacatttgatttttttagatagggtgggcacgtaaaatcaagtggagaggaaggggaaggggcgtctgtaatgagctagaaagttagtcctctttccaaataaggaaatgaatgtgagctggtactgaggtgtgcctgggcatctaacaaaggtaaaaaggaaaaaggagaaaaatcagggggtactatgaattaaagaataaaagattgatcagattatttgaagagaaacctcatcatatcccacaactggaagaaacaatttgatggcaagtttctcttcgtcgtttaccagctcaaaatctcaactatcaaaggcaagaaaaatacacacacacacacacacacacacacacacacacacacacacacacacccctctgcctttttctgtatggccaaagccttcagtccagctgaccacttcccactccagttaccatgttagcctcccaacttgtatctctgcacccttctgataaagcctccacaatgcaaaacacgaatcgtatcatatggctcttcttctctaaacacttccatctactctgtggttttagaagagaatgtaatagtcccacattacaaggtcttaataaattgcattcttgcagctctgtatcattacttgtaaacactgtagtctagatagccaggacacactgcatttcttttttaaggctcgatacctcttgccattttgcacgtagttttccttctgtctgaaatgccctttttccacctggcgcttgaatggccccttctgaaaacttcctagtcgtctttcaaaataaattcaaatgttagcttttgtgggtaacctattgacctctccaggctgagttaagctgttcccccgaggtgtcttgttgaaatcattattttttcctaaaatctctgttctaatttacttacatgtctgtgaatgcttagaggttacgaacttcagttttgtaagcttagtaactggcacaaagtctggcacagagtagcacctgaacaattatttttctggaataaataaagtaatggtttcattgaaatgattcgcattaaattaatgattagcattaaactacaacgtgtatatgaaacattccagttaggttgggttcattccattcctatttaaagagtttgtagtttctggctcttttccaactctgattcttcagactagaaatgcaatttctgctaatgtatttattttaaccaaacccgacatcaatcaagttatttgtattcctcataaggtaagcataggaatttacagtgatacaaaaacgcagctattatctcttataggcactggtaaagcttttgtgactagtgctactatactggtaaggtattgctgcttgtaatgaactaaatatttcagtggcttaacacaataggagttcttttcttgctcacatgacaacccagcgtatgttttcctagtcaagcagctttcttacatatgttattgcagaaacctaggtcctgttcatcttcttcctctgcctgccattcccttggtagcttttctctgctcgggtttcgcaagaggatgaaatcctattgaaaatgatctgagggtctattatgttctcaagaatggtacatatctagtctatgataaatgctcaggtaactgattaggtgtaatagatatcttaggattttgtcatgaacaatcagcatcaacaccacctggaaaattgttaaaaatgcaaattattgggctccacccagtatctactaaatccagaactccggggctaccatgcagcaattagcaaggtctccaggtgattctgttgatcctaaagtatgagaacaactgccctagggcgttaggacttaattctctcctcagtaagttgtaaagatttgccgtaggacctaagagtcttctgcttccagcaatagaaaggaaaaaaaatgtggaaacctcactaaatttttcaaagcctcagccccaaactgacaaacaacacttctgctcacattctgctggctataaattatcgtatagctagctgcccagtgaagtggaaccagctcaggacggcctactgttatattgccaggcattttttgagccacttgatgttatcttcttggtaatttaaatttaaccgtggtaggaatatttacaccacagaaattggcaaacactaaaaacaaggtgtttttaaacaccctgagatcagagatccagttgatatacatctaccagcacaccactggccatatacaggcttgccttatgccacggggagctctgcagctgaagtagcccttcaaacttgtcctgctttgagccaaattaggcctctatactttcaccttcatcagtcactgaatgagggctgcctggggaaaggcatgaacttggacaaggcagctctctgcagctcaggcagtccctgaagggactgacagttgaagaatgtctactgacatcatttccatcatctagaacaagagtctttctttgaagggggctctgagtagcatattcccgtgtccactgcagcccctccctttaagagactctgatataattgactgggggtgagccagtacattaggattttcctaaagttatctggataattttagtatgcaaccacaatagatactcttcaagaattaagctagttgctgagagggaactgttttttgttggtttgttttcactaatgtttgcactctacttcctttaaataaaattatgcctggagaaagggtttttgtatggagcaattgataaatatttgtagggtggttggctaaaataattataattcctttaaaagaaattctacccactaaagttaatttagaagtaaaatataatagaaatccaataatatattcaccaaatggattaagatgttcatgaattatcttcaaagtgttaatcgaataagtaatgtgtatgcttttctgttaaagaggaagttagaagatctgagctctgagtggaaggcggtaaaccgtttacttcaagagctgagggcaaagcagcctgacctagctcctggactgaccactattggagcctgtaagtatactggatcccattctctttggctctagctatttgttcaaaagtgcaactatgaagtgatgactgggtgagagagaaaatttgtttcaattctaaagatagagataaacctttgtgttattgactgtgcaaaaagtcttagagtacattccttggaaattgactctgattcaaagtgttgcatgacaacgggatatggggagtgttctctggagatacacccacaaggaagagaagagcacaagggagattgtgggagagtctgaaatgtgatttgtctgcagcagaggcctaagccagtctcgcaggagccctacatctgggctggctgtgcagagctgtcctgaattgcaggcagtgggcctggcccttgtattcctgatccagccagccattggccaggggctggctgctgcctgagagtggaaggacaacttggacaagttttctgaggccgaaggcaattcttagtaaggaacaccattaacaaccaatattcctagcatccagggatgtgtgcattgttcctgaagagggacaagtatgtctacaaaaatcacagaaaccacagaaacacacacagtcctactagcacctctccctgtcccatttgcaaacaatttaagagctctcccatttttagttcaagaaaaagaaaaatggattgggaggaccacaagctgacttgggggaggaatatttcctcatttagctgtagttttaacttttgttttcactgcatattttcagtctattttattttctttcctcttcagttgttgatagaaggtattcataaattctcatggcaatgttaatgctggctttgactctcaggggaaagaggccagaaaacttctttgctgtaccattccataattaggcagaactaaaaacatctttgggtgttgttttttgtttttgtttttttttttgccttgtctgcttttcaaagatcaaatgattgaagcattaaagcatggtgactggttcttcaggtaaagttgatttttattttatgtcaagtagaaaaatactgaactggaagaatcacagctggggtagcacaatcataattcattagaaggcataaatagtgcttggattaaaagaagccctacaatctggggacagtgcatctcatgtgccctctgggattactcggcagtcatcagagttagatttaacgactttggagacttaagcattatggttttttttttttgtcaatctgggacactgaaattgctgtatcagggttatactcaactgtgtcaggtttatttgtttttatgagctgtaatttttggttccctcagcgcatatgcatagtttgttcctatgttatcatttattggtgtctgttttctggctgtctctggtaggttcagcctcagactctgtaactccatgaagagattatgttccaatgatgttttataagtttgttaaactctgaactcatgagtttatgtcccatataagccacgttacacatggtaggaaggctccaaaaccagggcgccgaaatccatttaacgtgtaacttacctaaatgtaacaatgtttataagaaaaatacattggaagttccagttttgacttccagcaacatatataattcatccactttatttattaacttccatgtgttgagcatcatactggtgctgcgagtacagcatagaataaaagtctctcctttcataaaacatatattgtaattgaaagagaaagacaataaactaatgaagaaaatatatactgtctcaataattataagtgctgtagagtgtagtctacagattgatgtcaatgggtatttgttagacacacagaatctgaggcccctatcctagacccactgaatcacaatctgcattttaatagaatccccaggtgaatcctgtgcacactgacatttgagaaacaccattacagagaacaactaagcagggagatgggatgagggtattattgtctatagtgtggtcagggaagcttgtctgttaagagaacatcagaaaactgatgtaagtgaggaagtgagcctggtgtatttctgggaaaattattccaggcagggagagaaaagactgagcaacgatactgaagtaggaacaagatgacggaatattaaggagatcagtgagactagaggagtgggtcaggggaagtgtgatggaagccatgagagatactcatctttcatagcactgccctacttccttctccccaacatgagggtctcatcaccccccaccactcttgtcttctcctatgtcctccacattgctgccagtatggagagtctgggaatgccctcagctcaaagctgtttggtgatagctggcagagttgtggtagtagctaaaaaagaattaagggaaagaggaattttctcaaaagcaggtgcttttcatcctctttagcaaaccgaaacagatctgagcattaagtcaagatgttaaatacacaaatgttgaatgaaaaaaaaaacaaaaggtagtcatttaaattcagagctgcttttattaaaataagattttcttttttctttactgtggtagttcaaatatcagaataaagaattgtttctattcccgacttcctgacttgcaggaagttaatcagaaataaatgcaatataaaaaaagaaaatctaatttgtattatgcttcttgtatatgtttattatttcatgtactgtattacaatgtaatagaatttataattcattatagcagattgtttccattgcattcctactattaaatatgtagaagctacacatatacttgtagctttaacatatatgtctttatcctcaaaataactgcaaagaacatatagataatttttaaagattaaggagcctgaggtttagaggggagatagctagattaaggccacacagctagaaagcaagcaagcaagggtttcagtccacatgtcaagctccacagcctgtgttttgttttgtggctgtgctttacactatctctctgtccaagaacctaatggaaaattacagatacagatgcagctggccagcagttaatataatttaactcaatcttaaatttatctggagtaaaagtgatacaagtttccgtgttttttcttttctttctttcttttttctttgtgtgtgtgtgtgtgtgtgtgtgtgtgacagaatcttgctctgttgcccaggctggagtgcagtggtgcgatctcggtttactacaacctctgcctttcaggttcaagcgattctcctgcctcagcctcccaagtagctgggatacaggtgcgcaccaccatgcccagctaatttttgtagttttagtaaagacggggttgctccatgttgatcaggctggtcttaaactcctgacctcaagtgatccgcctgcctcagcctctcaaagtgctgggattacaggcatgagccaccttgactggcctgtttctgtgttttttctacttaagaagtagaaaaaattggttcactctatttgaatttcttagaaccatagaaatccaaacttggaataattattgcaattattatctagttgagtattcttcttttatagatgtagaagctgaggcctaaagttgcttgttttgttttatgaacactaaaccaaactaccttgtggctgcttacttaaattataaattataatggggtggccttgcctgagctgtataaattgttttaattatcaggacaaatcaacatactggaaaaaaaaagcaaaacttgcaattgttgttgcttagacacctgtccatatcagtttctattgttgcatagaagcaccccaaaacttaacagttcaaaacgagtgatttattgctcataattctgtgtgtctgaagtttgctctgtgattagctggatagttattctgatggtcttgcttggtgttacttatgtggatgcagttatctagcaagtgaacaggagctagatggtctaaaatgcactctctcagatatctgacagctggctgttggttgcagaaccttgattcttcataaggccactcatcatcctgtaggctagattaggcttcattacatggtattctcagggcagttttccaagagagggcgggtggaagctacaagaccttctgatgcctaggctttgaaacgtgtaggttacttctgctaagttatattggtcaaagcacctcaaaagatcagcccagattcaagagatgaggaaattacttcatctcgtgaaaggaggagatgccacatcgcatatcaaaggggtatgcatattggggatagaaggttttattgtcaccgtatttatacacaaatcactacattggggaaaaggagggaaactggagatcaaaagtgttggtcttaatccaacttaattctcaaaaattaccatgcgttagaaccacccagttcttcgcaaagtatagattactgggcttcaaccccagagtttctgatttactagctctggggtgagacctgcatctctctctctctctttttttttgagactgagtcttgctctgtcacccaggctggagtgcagtggtgcaatctcggctcacagcaacctctgcctcctgggttgaagcggttctcctgcctcagcctcctgagtagctaggattataggcacccgccaccacgcctggctaatttttgtatttttagtagagacagggtttcaccatgttggtcaggctggtctcgaactcctgacctcaggtgatccacctgcctcagcctcccatagtgctgggattacaggcgtgagccactgtgcccagccaagacttgcatctctgaaaagttcctaggttatgctgatgctggcctatgctttgagaactactaccacagacatacagtgagtggggaagaataaattcatcccttctgctgtgtgcagcaaggagtgggattccaatgagatccagtgctgtgaatgctaaagggaaatccatcttattttagcacctctactccccatctccccaccccgaggatgttatagcttagaagttcaaggagatggacaacacactaaaccaggcagtatttgccctgcagagctgttcagtgttcctggatgagacctctgagaagaaaagccataagttcctctagagactttcacaatcatttaggtagacaggactttgcatgggtctgaaggcttgcatggcagatggaggcaaagagccagcaaatctggttgtaaatgtcaatgtgaatcctttcttatccacaagctgctgggcctgagaacattaatgttctacaatacccgatttagcatttttgaaagaaattgcatatagacatgcttaatgtgaagactccaaatcaggatatttgattcaaatgtctcttggtaataactatggaatgaataacccattgtatatggacatatagaagagccagttaacagagttttctttttttttttttttttttttttttttttttttgagacggagtctcactctgtcgcccaggctggagtgcagtggcgcgatctcggctcactgcaagctccgcctcccgggttcacgccattctcctgcctcagcctcccccgtagctgggactacaggcgcccgccaccacgcccggctaatttttttgtgttttttagtagagacggggtttcactgtgttagccaggatggtctcgatctcctgacctcgtgatccgcccgcctcggccttccaaagtgctgggattacaggcgtgagccaccgcgcccggcccagagttttctagttgattaaacactggtaaaatcatctcttcctgtaattaagtttggagagagcaagtctcaagtgtaattaggaaagcacagtattggaggtcaagaagcctaaattctgatatctcagttgtgctaccaactatataagggatcaacagactgtttctgcaaaggaccgatactagatattttctgctttatgggtcatgtggtcaactctgtcattgtatactaaaagccacagacaatacctaaataaagggacatggctgtgctccagtgacactttatttacagaaacgaggcaggtaagatagatttgacccttagtgggctacccatttccccttagcactcagccttcctataaaccatgaagcgtctaactacaagtacctgtgagtcttcctgagtcctttctctgcctgtaggagtagctctcccacttgcagagcaggctggaagctggggaggagattatctctggaatagcacttaaccaatggacaaaagctgggggataaaggtgttggtcttcatagttttcatactgctatgaagaaatacccgagactggataatttatacaggaaaaagaagtttaatggactcacagttccacatggctggagaggcctcacaatcatggcagaaggcgaaggaagagcagaggcacttcttacatgacagcaggcaagagagcatgtgcagggaaactgctctttataaaaccatcagatctcatgagacttattcactatcaggagaacagcacaggaaaaccccacccccatgattcagttacctcccacatggtccctcccacaacacgtggggattattggagttacaattcaagatgagatttgggtgagaacacagccaaaccatatcaataaatatcccaccttcttctccccttgggtaggacacctccaatgcatgttccacactaaaaatctccagtgaattgggcagttgaccacaatgataagcatacttattagcatgcctcgtataggcttccttccgatgtgtaggctttcttcccattttggcagaatctggacccaaccccacatctcctgagtttgatttcagtcctcttcagtattctcatatatctcaactttgttccctgctgagatacaactgacagatatatatgtatcttcagctctgcagctctatcttctcttctaccatggctttctgggatcagctcccaattgaattatttgtatttaaatccttgtctcagggtctacttctgagcaaacctaaattaatacaagtcttagaattagtgccacagttataccttttgagtaagttatgttgcaattcccattttatagatgagataaccaagggtcagaaaggttaaataatttgtccaaggttacagagctagtcagtgacagagtgggtattcaaaaataagtctctatgattccagagcttatgctattaatcagtgcaccatgtatcaagcagtgatttagttatcttcatttgaattttttgaagtctctatttaaattgaatatcaaatcctcacatataaggttatttatacctttttatttgttttatttatttatttatttttgcttaacttttttttattatactttaagttttagggtacatgtgcacaatgtgcaggtctgttacatatatatacatgtgccatgttggtgtgctgcacccattaactcgtcattgaacattaggtatatctcctaatgctatccctcccccctccccccaccccacagcaggccccagtgtgtgatgttccccttcctgtgaccatgtgttctcattgttcaattcccacctgtgagtgagaatatgcggtgtttggttttttgtccttgcgatagtttgctgagaatgatggtttacagcttcatccatatccctacaaaggacatgaactcatcattttttatggctgcatagtattccatggtgatttatacattttaatttgaacttcactcacctctacaaagttaaataaagcattccatttccatttcaataatactttaaatatctaggcagttaaagcatgaggttacttggcacttaaatgtactcttgtcatactacttttgttggcttaaattgcaaaaaaaaaaaatggttaatttattgtgacaataccctacatttatctgcagtgatcattttttttgtgaaaatggccttcgtttatctgcagcaaaggaaaaagaggatggcaattagttcttgcattcttattcctctcttgggtcctgatccttctcattaatagaaacatggcaggggaggggtatataacccacaccctttcctgttgtggttatgtttccactgttgattctgcttcaggtgaacctttaggattaggcaaataaatttccgtgaggccaaatctttttcttcctcattaacagatgatttctctgctaaaaacacttacgacatggctatactattgccggttttatagttacaggctctaaaccttgaaaacttcctcaaagtctaatacgtcaggagcaagcttttgtacaaaaaatgtgaagacccttaatcagttccaataacaaaataaatccattttaaaccctatcccaagatactgcaaggccttggagcagctggagagactccttaactcttgacattaattaattaatttaaaaattcatatttgtatgtatcagtgaggtaagagtgcttgaaatataatgagatgtgtcacactgtagaaaggggagtgacaacagaaagccctggctggtgaggccccagcacttctcacactcatcagaaggaagtctttccatgaaggcagtagggggtccctggtcccaggccaggtccttcaacaatgctcactggttaacaggaaaggcactacagtggcatcattgttaacatccaagacagtgatagaatgtgaaacttctactgtttagtatttagtattcagcatttagatgttaattatccattttgtgatgaagttccctttcttctccctctcttaaccttttggtagttttattgcatggttaccatttccagttagggttgtgctttggggtctgaactgatgaaggaagagaaactctagttcatcatttctaggaaaaagagaaggctaacatcaattctgatgattagagattttttgattacctatgtcctgcattttaacagaaataaaatgttaattacagtaaacttactttaaccttcttatgctatttaacactcttcaagaaaggacttttgcttgaaatcactacagagtataccataatcttgactgtcatactctgaccaagaaaccagaactatttaggcatatttatgagagtaagtaccctaccgctcaaaatggaaggcttcaacatgtattcctaatatttcctaaaacttcactgaatagttttaaaattgaatataactttaccttcagagagaaacaagatttcgaaaggaaattgtagcagttttgtacttcaattgtcgattttaagattgtggtctgaaaagtatttgaacagtcattctttcttttccactatctcaggaaaggctctcattctattagaagcaatcttagaagcgtaactgccaactctcttcttaaaaagtgaagagcagatggagttctaccaatctgctatacttgacagtttttcaactacctaacctaagttccagttactgtctaaattatttttattcgaataggaaaaatacatttatgcttactgtacatttcgacagtgttcattctttgaggtctgttatttaatctccttcccacttttcttttctatcttaaatcagatgagtccccatggtctggcaacaaaacagctgtttctcaaatttttaacgtctctgtggccctcctcctacccttccaagtgttttccatactatttttctgttgtgggcttcagaattggatgctgttccataattactggtcttcccatgactctgtcacatcataaagtctatatatacccttttcctacgtttacatgccaaataccaggtgtgtctagctttaattcaatgactagcatatggtaggtattgcactaatattttttggtcaagtgaacatatattttacagatagatcaaatacatcaaccttcccatgtaataataataataccaagaagattaaatgatcgcgtgcttgaccagctgtttagtggcagaatctggacccaaccccacatctcctgagtttaatttcagtgctcttcagcattcttatatatctcaactttgttccctgctgagacacagctgacagatatatatatatatcttcacaatctcagtagtaagccctatttttttaagattacagtgctgatcaaagagggatattctatggcattgatgcaaatcttccaggccagatataacccctatctccttaaaccctcattcttgactgtgtcttgaaatcaaatttgagaacctctgctttacatgctaccttcctcttaaaattcataaggtttattccttctctcatcttcagtatttttatgaaaatatgttttactcttatttccaaagtgcttgccagcccatgctgagttcattagacaaacaatctaggtatcctaatatttaggtaaaattgctagcagcactaactataccagtacccacttaaattgcaatataaacctacaataggaaaaaaaaagtcaaaattatactactttcaattcctacttctggaataattatcacaccttcaaaaaaactcataattgttctccaatattaaaaaccaggaactaaattacatcactatatatatatagctatatagacatataactgtatatagtttatatatatattacatgtcactatatatggttatatatacagatagctatatctctatatagtttttatataggaaactatatatataaactcatatatatttatatataaactcatatatatataaactcatatatatttatatataaactcatatatatttatatataaactcatatatatataagagattttatatgtatatatgagagacaatattgaaataaaacaaactagccaatctccaatgtcccttcattttcccaggactcttctttattctcaaagaaatgtatgaatacacaatataaataaatgttctataatgttcattatggattataatagttttcttgtcatactgaagtgaatgggaattgtttcttcgattattagcatacttttcataactatgtgatttggtgataggcacttttgcttactaagttcagcatgatcaaaacagaactcctattatttttattgttgattcttatttctttaaggtaaaatatgcccttttcctttgaacctgcacactgtttaacaaataagcacataactcaggattgaattgtacacttcgatttgagcttttttttcaaggtcaggacccagtttcacaagaagttttattttttccaatacaactgacatccactcccaccagctgaaagacaagaaaaacttgtctaataaagctttcagattcaatttgctgcctgcatacagcttgaggaatctctggaggtcactcacagcatgtgttgcaaccccaacagggagaagtaatgaaaagattctagttaaaaagctgacactgccccttccaacctctttgaatgtgaatataataagccagtttacagacgcaaatctctatgattctggggatttccatcttgatctctgactccaaggaacatttgaatgcatggatttgtatccattatctgggtgaataaatgcttcatattgaaaaaaggggtgctttaacaacataagtctgatgtaaatcaggcaaaacaacattgtcacttcatgtttaactctcctggagggtctctaaggtctcacagtttggttctattccagtaatatataggcctatcatagccattttcaaaaataatacctgctttcatttcgattattccccctagcttttgcattgacccgaacatacctaatatttatcttagggctaacacgcattaatgccttgctctgtaccaggcattttgccaagtattctttgtgcatttttctgtttaatcttacagcagccttatgaaataggtactacattattattatttttcaccatgagaggaaatgaaagcctagagagaatggttatccaaaaacacccagctactaagtgggcacagcatggccttgaacctgagtctttataaagttcatgcctgtcttttacctttatgttaaacatactgaatcttggtcatgcagtctatgaatgaagactccatatactctaggaccaattctaccatattgtgcatgcttttgtacatattttccaaatgaaattaaacaacaatactctctcttcccctttcttttccgttttgcatgacatctaaatcttttattaaatctccgtgggtggaattgggccttaagtagtagtacctttgaagcttaatactataacctcagagttacggaagtggtttcaatatgaagaaatatatacgttcttttcttttcttttcttttctttttttggctcctctagaatagaaggcaatcaggagagaaaaagacattaagatgataggcttgattctcccacagtgttactacttagctttatttattctcccacatctgtaactgtcaattcaaggtcaaaaagccagtacagcagcagaattacaaaaagtagatctggaaaatctatagggtaccatagtccagcaccctgctgcaagtcaaaatcaattaaataaatatgtttaaacagcacttcatttaatcttaagggcaccacgactcccttggaaaattcttttttgtgttcagacctgattctctgaaagtattttctagtgttttctttgttcggtggctgtggtgaataagtggacccaattgcctacagcatgaaatcgtagaaatgaatatgggctggaacttcaatcaatcacacaaaccagaaacatagagttcatcacctcttctggaaagcgtccccttcggccgtcaaaagggtagagtttcctccaacatatgttcatacttccctttgcctcccatctgcaatttcaaccagtctgttgctctcgccctttttaggcttcacataccggatttcttcttaggagctcacttgaaaaaagggttgtatgctttaaaaatactaaaagtcactggactagatgataataaaatttctgtaaaataaaaagggagttaacagaggtgttaccacttatcataatggatattgttgacctttcctctagccagtgtcccacttaagcatgcttcttggctggaatttatttttctcatctggataaatctgaagcattatagtaaaacccagtgtgagcaaggccatggatgcaagtggattgagatgaatgagtggatagacctgcgtgggcagaaataatgaggtcagcaataagccataccaagggatgcacactcaaggaataaattggaggtagcagaataactgaacaaatgatacatttgatcagactgtcacatgaatatcaactgaaacaagttatgactgtagttagtgaaccctagagtgaagaaaacaaaatattgaaatccatctgatcaaaaaataataaaattgtttacatgtatatattatctaaaatttcccttaagaatgaagattataaattcccgcagttgaggaaactgaataagaggagaatcaggacagaatcttttctcttcgtattcctagtccatttttcttctaactacagtagtgagaacaagaatttattcaccaaatcataatacattgcaattaggggatgccatttgaatcttggaagacacgatttgaggcaaataaaaaatccatatttataaagtcaattattggtttatataatttactgtttcagcgggaggtataggttagtaatgtaagtcacttcaagaaggttttggtcgaagttttgccaattttttctgtaaaaagccagatagtaaatattttgggttttacaagccagaagatctttgttgaagttactcaactctgctaatgaggtgcaaagcagccataggcagtttgtaaatgcataagtgtggctgtgttccaataaaagtgtgtttgcaagaacaggcagttggttggatttggcccacaagccgtagttcactgacccctgttttagataaatactagtcaatagattccttgtagctaataaagggaatatagattgtttaatgtgtttccctaatcttcttaaggcttcctccaggggaaaaaatatttcttatcatcagcagtgttattaatgcttactcagaacaaagaataccacttacttagcatagaatggacatttataaagccactcatggaaagaataaagagatgtgaaatacctggtacaactcttaagagtgttccactatcatttgaaaaaatgatgagtagtagttatataaaaggactcgagcctaaaacatttgttctcactttggataacgttttcctatctcagcatcaaaaaatacaaagaaaggggataactaggtcttagattttctaaattctcatgactataagtcccatatatttagatattgaagtacccttaaatatacctaagtagaagtaataatttcgatattatgggaaatctaattactgctcatagttctcgagattaaaatgttatacaccacatctcagctttctttgaaacttgaaatggcatacttgtacaaaggtagaatggtctcccaaagcagcgtcatagattagcagaaaagagctatgataatgccacttcaactgactatcatttaaataatgaattagttaggaagagttaaattatatagttacaggcagcaggagatgtcaccatcagggggataagaagccattttccagtacactatttgacttaactggtgcagttccttctttaactgtaggttactcatttgtatccttaatttatcaatatactaatctgacaaataatttattaaggattactgtgtgccctcctgtgtgttagattctagggatacaatatggatcaagataagcgtgattcctagactcctagaaagtaagaaaactaaataactgtacgtgacaaatactaggatgtagaatactagggaagaatcaggaagaatcacctcacccagtctggagtattgcaacagagcgatgtcagaggaaaaattctggaaaaaaaaaaaaaaaaggaaatttgaagatgagacttgaaggataagtaggtgtacctaggcaaacaagtaggggagagtgttccaggcaagagaaacaagtaacagttggaggcaaaatggagcctagcacgttttaaaaatatcagtatggctgaagcactgagttggggttgggaatgggtgaggagcgatgtgtcagggaggacattccagatgatgctggaaatgcatgcatgttcgcaaactgcattttaagacatgttagagaaatcaaacacattttatttgaagggtaattgaaagccactgaagcattgtagagagactagtgacatgagcatatttgggttttagagggattactctggctgaagaataggtaactgattggataagagcaactttggaggctattccagtggttcaggtgatagataataatgacctaaactaaagaagtaataaagggaatggagacaaagtagacagattcaagtgatacttggcacgtggaaacaacaggccctggtaactgattggacataaaatggagagatacagagaacgcgaatagaacacccaggcatttggcttgataaaccgagtagaccgtggtagaaattactaaactatggagtattttagggttcaggggaactgtgagttcaattttagacatctagttttgcaaggccactgaggtaactgagcatatgagtcaggagagaagtttaggctaaaaatatggatgccagagttaaccagcgttatgataaaacaaagctgaagtctcgagggtaagaacacctaaacatctaggctggagaaggcagcaggtaaaaagtaaaaggagaggccaggcacggtggctcacgcctgtaatcccaacactttggggggccgaggtgggtggatcacctgaggtcgggagtttgagaccagcctgaccaacatggagaaaccgtgtctctactaaaaatacaaaatcagccaggcatggtggcgcatgcctgtaatcccagctactcgggaggctgaggcaggagaatcgcttgaacccaggaggtggaggttgcggtgagccaagattgtgccattgcgctccagcctgggcaacaagagtgaaactccgtctcaaaaaataaaaagaaagagagagagagagagagagagagaaacagagaaagagagagaggaagacaaagaaaggaaggaagggagggagggagggagggagggagggaaagaaaagaaaaggagaaaaattcaggagaatggttacttccagggagatggaggcgattgtgctgtggggaacacaagggtggggtcaaggtattagcagtattctatttcttgattggggttgtatttacataaagtgttgctttataattattcttcacactttatgtgtacgttctatgtaatcatctatagataagacagatttcactgtaaaagaaaataaaagcttccaaaagattatcatcacaattgtaacagattcccctggtgcctggagtcacacgccattttcctgcactgcagttgcagctgcagtggacagccctgtgtgagttcagacttgcctttagctgacagcatcccatgtcaagggaatggctcccatttttctactttctatctaagggacttctctgacatcccaggagcccacagattttgtgagctttctcacccttgaagttttagtgagtgagcaaccttcaaccaatggagatgggagcccatggatatatttttaaccactattccttccgggggcaaggggaattctctgtgattctcaggaacatacaaaagttctgtcaaaatacagtccccatggtccataagcattaccttgatgataatacatttgattggcatttcctccccctctgtctcactcttttggtttttcattcttgcttcctagggatcagcttccaaatgagctatctgtacccaagtcctcatccaggccctgttttcaggggacccaaagacaacaataagaaaaatggaactgaaagaggagaagactttaaggcatgaaaaaagttcctctgtattccatactgcatatttaactgcctactcaacagttccacttagatgtctcaaaaataatctcatgatcttttactgctatgaaatgcatgaccttcccctgatatattcctttcttcaggttttgtagcaccacttagctatccagtaacaaaatcttgggggtcattcttaaaaccttcccacctcacccctgctggacatccaccactaagttcagttgatttttttgctcctaaatatttcttggttcagctttcatttttagatttatcctgcatacccctgtacaatctcatcatctctttcctggactgttacagtagtcttatattaggatgatcatagtcttgatttgcctagagaaaacatgctttatgtcattgcctcagagtgactaatagtcccacctttcacttgtaacactatgcaggttattgggttaaataatactgtcatccaaacctaatctctcctcattcatttcttctctcctatgcatcttagctgtgtgaaaattcaaaatataaatttgatgacagacagaactctgtttaaaatgctccagtaccttaccatttatctcaaaataaaaatttcaaaaaaagaaatgatatcccacaggatcttgtatagtgtgaccctttccatttcatcatccttataccagatactgtgaactacttactctcttatctccacattgacctccctcctagttttgttttgcttatgaaagtgcttattttctgttttttaaagccattgcacatattggtctctctgattgagacactatccttttgaatttttgacctcatacctactcacttttcaggtctcagctcaaatgttatactcaggaaagacgctccttacctcccaaactaggttagtgtaaatggcactatttatactcctcttccagagcacacaccaaatcttatatttatttgtgggacaatttgaattcatgttgttccccctactcaattgtgagcttcttgaggacatactctgcctcctccttacctagctttattgaagtataattgagaaataaaaactgtatgtattcaaggtatacaacatgatgattttatatgactatattgtgagatgattaccacaatcaaattaattaatacatctagcacaagaaatagttactattgtgtgtgtgttgggggggggggatgaggacacttaagatccagtcttgtagcaaatttcaagtaaacagtaaagtattattaactatagtaaccataatgtacattagatccccagacatcttataactgaaagtttgtgccctttgaccaatgatatggtttggctgtgtccccacccaaatctcaccttgaattgtaatccctgtaattcccatgtgttgtgggagggacccagggggaagtaattgaatcatgggtttgtttccccccatgctgttgtcgtgatagtgaatgagttctcatgagatctgatggttttataagcatctggcatttcccttgctggcactcattctctctcctatcaccctgtgaaaaggtgccttcctccatgattgtaagtttccggaggcctctgaagccatgcggaactgtgagtctattaaacctcttttctttataaattacccggtcttgggtatttcttcatagcagcatgagaacggactaatacagtaaattggtactgcagagagtggggtattgctgtaaatatacctgaaaatgtggaagtgacttggaactgggtaagaggcacaggttggaacagtttggagggctagaagatgacaggaaaatgtgggaaaatttgaaacttcctagagacttgttgaatggttttgaccaaaatgccgatggtgatgtggacgatgaagtccaggctgaggtggtctcagatggagattaggaacttcttgggaactggagcaaaggacactgttgctaagctttagcaaagagactggcagcattttcccctggcctagagatctgtggaaatttgaacttgagagagatgatctgaaattggaactttgttttaaagggaagcagagcatcaaagtttggaaaatctgcagcctaacaatgtgatagaaaagaaaaacccattttctgagaaatacaagctggctgcagaactttgcttaagtaaaggagccaaatgttaagcgccaagacaatggggaagatgtctccagggcatgtcagaggtcttaatggcagcccctcccatcacaagcccagaggcctaaaaggaaaacatggtttcacgggccaggcacagggccgtgctgctttgtggagtctcaggacttcgtgccctgcataccagctgtggctcaaagaagccaaagtacagctcaggctgttgcttcagagggtgcaggccttagtggcttacatgtggtgttgggcctggggttggacagaagtcaagaattgaggtttgcaacctctgcctagaattcagaggatgtatggaaaagcctaggtgtccaggcagaagtttgctgcaggggcagggccctcatggaaaacctctctgctgggacagtgcagaaggaaaatgtggggtcggagctccacacagagtccccactggggcactgcctagtggagctgtgagaagaggaccaccatcatccaaaccccagaatagtcagaaatgctgatagtttgaaccatgcatctagaaaagctgcagatactcagtgctagccatgatagcagctgggagggggctgtaccctgcaaagccacaagggcagagctgcccaaggccatgggagcccacctcttgcatcagcatgacctggatgtgagacatgtagtcaaaggagatcatttgggcagttcaaagtgtaatgactgccctattggatttaagacttgcatgtggcctgtaacccctttattttggccaatttctcccattcggaacaggtgtatttacccaatgcctgtaccccccattgtatcctggaagtaactaacttgttttggattttcaggctcataggcggatgggacttgctttgccttagatgaaactttggacttggacttttgggttaatgttggaatgagttaagactttgggtgactgttgggaaggcattattgtgttttgaaatgtgatgacatgagatttgggaggggccaggagcagaatgatatgttttggctgtgtccccacccaaatctcaccttgaattgtaatctccaaaatccccaggtgtcatgggagggacccagtgagaggtaattgaatcatggaggcagtttcccccatgctattctcatgatagtgggtgatttcacatgagatctgatggttttataagtgtctggcgtttcccctgctggcactcattctccctcctgccaccctgtgaagaggtgccttctgccatgattgtaagtttcctgaggcctccccagccatgcagaatggtgaatcaattaaaactgttttcttcataaattacccagtctcgggtatttcttcatagcagcatgagaacagactaatacaaccaacatcccctcttgtcgattttcattgaatccccattacctgggaatgaatgaggaaggcagaaatagaaatcagcgtattgttcaatatagaaatcctgaagttacacaagataattacgagcaagactcagtacagagaaggaacccttgagctggggatcagagtcttctggaaacaaggagtaccaaaggggagtgaaaaagagaagtggagaatgagtagtagcagtaaaagaggaagtatgtaaagaaatggaaataaagatgaaataaactgtcatcttgttccagagacaaagctagctaggggagctaaggaaatttagagggataaaaagtctcatccaaaccttcataatgagctaagggctagtttttcatagaccctagcccaacttgcaaccctctcactctcttacttttttcctggctctgttttgctttactgcctttcatataatctaaaatgatgttaaatgtatatttcctgtctcttttctatatcacaatataaattccatgaggccattgcctgtgccacatttaccactgtactcccagtgcctagaatggtgcccagatcaagtagactcccagagtgtctgttgtcaaatgattctcagtccagtgatgtttgcactacatggtgctgccacttttttttttttttttacttcattccatttggaatttggatcattttgccaactttagggtttattcctctttatttcccctgtgtttgctgaatatctgactatctatttttctcagctctcttctcctcacactttgcctccaacttcctctctgctacaaattatacttagcacaagactggagccacttttcattgattttgatgtcagtgcttgagtgacaactccatgtggagaactttcaacctcctgctgtctcgttgtttgctttgaaaaaaaaaaatactcatcttcttcctgaacccactgggtaaatttatgctcacaaaaaagacaaaacttctagaacaaaaactgtatgagcttcaaaagtattagttttcccttgattttgagactcaaaagtaccatagaaattttaaaagggggatgaagtaattttgtcattcaacccgatatattttacaatttgaatgtcagaaccatgaaatgtcttttcagtgtactatcatcctcactatttccacctataaaagaaaagcaaaaatattgtttgagaacaaaaaaatattgcagtagcggaaaaattcactttaagtctttttttggaggttgccacatcacgcctgtcttcagctcctctcactgaagattctttgttttcttgaaaccagttggtcacttccaattcttaccacctataaatcttcctggttctttatatttcactttatatgtcccttatctcctctgatttttgttccagtctttcattttttacattctttgtcatcctatatgtcagaaagaatctgccactccaaattccttaatatatttatctaccagtgtttatttgcctgtcacatgtactcttcagtaatccattgacttgaaaactttctactctgtctttcttactatagtttgcttcttgagttcaaattattaatatattaggtcaagtaattctatttttatgcacattttacctaacattcttggtaaatataattgttttttaaattgcatcacatggtgagtattaatttaagacgtaattagtattaatctactggacaagattttatttattaactgttttgccctttgctagggttctgtaatctcaccctcagtgcctttaaatagtcttacccaaggatcacctatccctcttcaatttaaattctctattgtgttagtttctgagattgcacattctctggtttggtttggtttttcagtgatctctgtggtcacttccaaccatttctacttagtttacttttttccctgttagccctcttcagtgttaatatcacctggaagttaacccattcctagtctgcattgctctatggccagcatcttggctgattggccatcacctatcctgtacttattgtcaatttttttaaattttttattgtggcaaacagcacataacggaaaatttaccatctgtctttgttcatgtatgttgctataaaggaatgccagagactgggcaatttataaagaatggaaggtttatttggctcatggttctgcaggctgtacaaaaaagcatggcaccactaccaacttctcatgagggcctcaggcttcttccattcatggtgaagggcaaaggggagctggtgtgtagagatcacatggttagagagcataaacaagagagagaggggaagtgccaggctgttatttggcaactagctcttgcagaacctaacagaatgagcagtcactcaacctgcccccaggaagggcattaagccattcaagaaggatccacccccatgaccccacacttcccgttaagccccacctccaatattgaggatcaaatttcaacatgagatttggaggggacaacatctgaactatagcattatcttaattcaaataattttactaccaattccatttattagagaatctaagattaagactactgaaactatgccaatgattatctctagttcaggcttctctcttcaattccaaactcatattttcacctgctgacaagctaccacgtagatgttccacaggtatttctaactcaggatatgtaaaattgatgttatcattattttctgaaaatctattcctcttactatattccctatttttgtgaatgacacaatctaatggactggccatgttaaaaatcaggaagtttttctggcactttctttattccttaatattaagccccacgataaattaccaatcctttcgatcttgttaagacaaataagcttgaaatttcttatctcttatttagcactgcaattttgttttctcattcattcagatagcatcttctacaaaacctcttcactagtttttctgtctctcagctcatcttgtacactgcaaatccattaaaactacactttttaacatgccaatcataatgtattagtaaaggttgtataatagttctctttctcttctaggataaaagctaaatttttcagcttggtacacaaggccgttcatggatttggtacctactagtctatctagggtatttcctacatcttccctcctctctcttgaaaaatcaagtaatactaaactatttgtaactccctaatcaccaattgctgcctttatactttaacatatattcttccttttgctagaaatacatttgtcataataggctctttggtaaacttaccattacattctcagtttataatattatttgtgtaagtaccttttttcctacttagtcctccaggggaatgcatgtgcttctctctccatattatcattttaaaatttactcctatttcagcaagtatcataatattttactgagattaattgttggcatatttatgttaccctggtgacatatttaatagttaagatgctttgggctgcaagaaagagaatgcactttcaaagtggcttcaaaaataagaataattcaactcacataactggaagttcagaggttaaagctggctccagatgaagtacaagcagagctctgtcactctttctctatgactttctttgtcctgatttttttctctgcgtcagctttgacctcctcactagttgccctccaggttccaagatgactgccagcaacaaatgggtaacataatttcttgttacagtgagagacataaacacttacctcacagattcagagatttcaccctcagataagaacaatcaaaattttaattgtgtatctactgtatcattagtatatgtattaggtattcatatatatctactattgtactaaagatgattcagaatggtttcataagctggttgatttaaacttttcttcctgaaccaagaggatgagattatcttgactggcttagaatcgaagatttaggtgaatctaaatccatctccagaactgaggatggattccgtagaaacttgaagacaattggaattctcctagaaagcagaatttcagagtgggtgtagggatatctttgaatggaagttgtttaagccaccaacaatattcactccattggggtgacactgggcccaaaggtacccagttaatatttgttcaacgaacctataggaagacaatattatctgcaagctatttataaactaaatgacaacgagaagtatttttagaaaagttaatcatatacaatttagtcattcacattgggaggctcttcctaaatttcgtttctgatccttatcttgatctttgacgcaatcatatcttggcctccatctaaaagccagtagaagcctctggccattttttaaacaattggtttaacaacattaattggaatctatatagctcaacttaaaaaaaaaaaaaagaggaactagcttatcataatacaatattgtcaaggcaagtgatacttccatgcagctattcagcatttggtgtattcttggtttctgcagacctaataaaaagagattatctcagcgtcctctaggtttaattttaaaaaacaagaaaccatgaacaatgaaaatgatttcaaaacatcttcactcacatctaaaatatgaaatagctagatcagaggttcttaataatttaatcggtgaagcataactgaaggatttagaaaaagtgcctaaactattaaaagattcttcagctgctgcttaatgttgatatcaagttattttttacactggcaaacagctaagccattccctggtcacatccacttttcagcatttagcgctcctctcaatcatcccgatcacagccccaggaatgtttcatggcatctccgcaataatagtatattactattgggtcctgaattttgaggtagtttatctttcagaaaggatatgaatagagcaataagtccaagtagagtgggctttattaatgatgcccaagattttagacgtatactataatcttcaatcaattttaacaccacttcccttaccctagttttagtctaaaccagtccaactgtgctgtagtctcagataatacaatgttagattttttttttcaagatatagaattgtcgggaaaacttgtatgtaacctataccaatctaaatttcttagcatttaactctaaagagtaaagcttttagcacttcctgtgtaatacaagggcaagtgctgatttctctgaatataattttcctttgttagcacatatgttcactgtttaataaaaataagaatgcttcaattatctccttttgtcaagggcctgagaaataaagaaatatacagagggtcccaatctaaaaatgttttgatttacaatggttcggcttaggatatttttattttacaatggtgtgaaagtaatatgcactcagtagaaatcatacttcaagtactcatacaactgttctgcttttcatgttcaatacagtattcaataaattacatgagatgttcaacacctttaataaaataggctttgtgttagatgattttgcccaactgtaggctaatgtaagtgttctgaccatgttgaaggtaggctaggctaagcaatgatgttcagtaggttaggtttattaaatgcatttttcaatttatgatgttttcaacttatgatgggtttttcaatttatgatgttttcaacgtatgatgggtttatcaggaaataatcccattgtacgttgaggagcacctgtatcaatataggcatttacacaactctcgtactgatagcggcaggaggcagagaagctctaggcagaaaagggatggtccccagcgaaaaccccaccctcaagccaaaaagcctgaaaccgcagctcaaagtgggaacttatatcccagttttcctgctcgaatgttgcctttttctaaaccacccatggccccaccccaccccatcctgtgcctataaaaaccccagactcagctggtagacaggactacagctggacatcagagagaagcagcttgacttcagagggacaacttgatggcataactttagagaagaatccggctggacttcaggggaagattacttgccacccccatccccttttcagctccccttcccactgagagccactttcatcggcagtacaatccctcacatttacaatccttcaatttgttcatgtgacctcattttccctagatgctggacaagagctcaggagccacaagtgtgaatacaaaaggccctttgcccttgctggtggagggcagctgcctcctgtgaaaagacaaatggcccactgagctgttaacgcctaagctgtccgtggatggcagagctaacagagcactgtaacacaccctctggggcttcaggggtcgcagacgcctccacctagatgctgctccagtgctcatgcactccagttcccacctcgtttgcttgcacactccctccagtgaggagttgagagcagtgggctaagtaaataaggcacccctgttgcgagttccacaaaggggtcagggaaatatcctgcttcgttactaagtaggtataaaccctttactaagttagtaattattcagtaataatacttaaatgaaagctattctgttagactaaattcagattatcaaagacacgacagaaaacagctttctcattcatgaacctattatttccttttgtaaaatatgttaaatgaaaatacagccgtcatgctaatttctaatggtagaacatattttgaaaactcctttatgtttggaagattttgctttagtgcagataatcagaatgatgtgatatactaagaaataatttttaaaatgagatgtgacatttctcataatctaaataagaaatggcaaaacattgtcctaagctaaataactcatatgaagtgataaaatattgctttctaaaggtccatgatatgtagtgatttctaatgtgtttaatagcattgatcctattgggtaattgggtggttctaacatgtaaggaaggcctccagtactaatttcatgtactgggaaactactgggcagggatgaatcccttaactcctaagtaagactatcagatcatataaatctgctttttgatttgcaaagactcttaggcatacctcttgagaatattaaacatctactaaattatatgtaaagcatttcagtctaagatttacaatgctcaaaggagaaagattttaaagttcagcattggaatttccataatttccttccaattgtagaattttacaattgagatagcaaataataatataaataaatatgtaagactgaaatcaacataggagtttggaaagaagactgtatgggttaactagagttgtcaacaaagacttcacagaagattgtgatcgtagacattagtaaggaataaaatgggtgcaaaaaaaagtctaagaaacaacaaggataaatttattttgtaaagagtgaaagcatattgggtattacataaagagactggctagtttgacacaatgtgtacttttggggtaagcagtgggaaatcactttctgtaagtaaagtggaagagaattcaggtattggatatggtcatataggatttttcaacctttgttttgcccccatccctatcctaccagtatcatcacagatgttggcaatattcactcacttgcctgaagatagatattcatgtcaggggctacagatatgtaaaggtgaatgaagttaaatagcaaaattcaagcacactagttctgactgtgcaccctctctcactcagaaaagcactttggaatgcgagagtactcttatattgacaacctttagttggttctaatttataaaaaaatataaaaatatttagacaatttggatattttatatctatgccacaacccattgtcaaatgattgagatatcattgtttggcaacaatgaaactgaaatcaactctaagagtaaagagtacgacttttaaagatatttggttaagagtaatgttgcaaggcagagaccaacattatagaagttctcaacctgtgtgctggatatagctaaaatttcccaggaccattgaaagaaattctcaaatccacaaccacctcaagtgttgtctgtgaatcaaaggagtgatgcattacccacaaacatgtagtagacattttttaagtgatgtagatgctactgcaattaataaatgcaaaattatattacaatattactgaattcagaataagttgattttgtcactatttttctcaatctacgcatgctagatataaagttattatatagagacgtaacatttttaatatttcagaagcatgctcatgatattgtaaaccaggcactgttaaaagatcactggattgggaattaataaacctgggatctagtcctcatttgatctcttgttggctatggtttgggggttttgggcaaactattcaaccttttctgccttggtttaattgataaatgatggtgttttcccagataaatcccttcccaacttaatattaccagatgtagcatctatggtttagaatgtacagtataaattaaccttcctgaagatcttcacaagttactataacctatattttcatggcactgaaaactaagtttttgatagcttacgtttttataaataatttacttactcatttttatcataataataaatctgattcactaatcaccaaaatatcatttttgaaaatagatgcatgaaaggatccgaacttgttatggttttatctgttcaagtcacctaattttggtagccacaggcccccattgtcaataggggaagattatccattttagcaatacagtctctgataacttcagcccatatgcccttcaattccacttttacgtcagattgaatgggaatgtgaggcccccagtagtaaactaaccctactttctctttggaaattggtctttctacctagctctttgcctctgttcacgttcttgtattccacagaaaatatatacattaggtgttaaaatcacaatgattaacaatttttaagtagaaatagttattaagtatagcataatcatgcctttgaattagtacaaaagtaggaaacagagctttagtgacttttttcattctttccaccatttacagggcaaaaatgaagaattttaccaattcaaaactatgcacatgtatagtttccaccagtatttagtagttatgtttctcaagatgtataattcctttcctttctgttttctgtagtttgataaaccctagataggagttaatgttgtttcagttaggtttattatttcttttatgtggtttaatttcatgcaataagctagagattttgtaacataacttgataaaaattttctcccttcgtatctttttgttttaaaataatggattaatatagattgtaattttacagtagaggaaatacattttacttttagttcttatctagatatcttaggaaaaaagaaacatcatttttaaggattattatttttctactaatgaaaaaaatagcatgattttccattctggactttgtaattaactttaccttggaataattgaatcttaaatataacttcattgaaaattttattttcaagtaacattttaaaatgcaaaatttgtgtgatctctactaaaaagaactctcacatcccaatgtgcttatagctacaataattggttaaaagagacaaattataaagaagatataggttgtgacattgaaattacaaaatgtggattagggaagtaagcgtgtagagttttgtatgcaatcaaagttaagttattaccagcttaaaaaacccttacgtaagatgtaaagaaaagcaaaaacctatagtagcaaaagcaaaaacctatagtagatatacaaaaggtaaaaagtaaggaatcaaagtatactactgagcaaaacagtcaaaccataaaagaagacaacaaaaaaaggcatatagaacaaaggatctacaaaacaattagaaaacaactttttaaatggcagtagtaaattcctacctatcaatatttactttgaatgtaaatggattaaattcaccagtctaaagatagagtggccaaatggattaaaacaacaagactcaactacatgctgcccataagagactcacgtcatcttttaggacacatgttgactgaaatagaagagatagaaaaagatattttggtttccatgcaaatggaaaccaaaagagaatggggatagccatacttctattagacaaaataggctttaaaaatcaaaaactaaaaagacacaaagaaggtcattaaataatgataaaaggatcaattcatcaagaaggtataacaattgtaaatatatatgcacccaacattggagtacctaaatatataaagcaaatataaagtgataaaaagaaagagacaaactacagtacaataatagtaggggacttctaccccaaattcaacaatagacagaaaatccacattaaaaaatcaataagaatgcattggactttatgctttagatcaaatagacctagcagacatatacagtacatctcatctaacagcaggagaatatacattcttatcaagtgcacaagaaacaattcttcagggtagatcatatgttaggccacaaaatgagtcctaacaaatttaacaagattgaaagcatgtattttatgtaaaacaacgccatcatggaaaaagtactagtgtaaacaaggtttaaatatgatttactgattgtttaaaaaggaattatcttagccctgatctgatgggatttcccctttgtaagcagcaaaaataagttcataatgaagcaactgtaataatacagcttcacagatctttctgaataaacagagttggatatgtttctacttcagaaaccatttactgtgggctcacagcttttccatacactctttacactcttaattttaaacccattcatcaaaaggattaagacaatgagattcaagtccaagacaataggaagtatgtgcatcaaaactgtcatgctaatgctctgaggaacattgttatttcaatagcataatttaaaaccactgaaaccatgttttatttatgattacctttcatacgttcaaaaagaatttgagatggtttggcagggatgtcttaaagaaacaaacaccaaatttttatttgttgtgcttctaacaagcaatttttcctacgtaagtgttacctgttttctccccttgattttgatctcttttgtatggttggtagttgtcgcacttctgggcatagtatggttttctacaagttaaataaaaacataaattgattttgatgtagctagttccactatttcagttagtgtgttttccatacctgcaattcataacatgtttactgacccagaacgttaaaactcaagtttagttcaatacagtcacttcaaaccaacttaagatagcagttacatttccaaggtcattatgaagacggagttcaagacttcagcagttgaatttgtcaagctcatgggtcttttagttacaggaagtgtgcatatttcacataagaaacagcaactctgatgatacattgaaactcaaatatacccaaggagtgtaaaactactttataagcccttaaacaataaatatgccaacaatcctctgcatactttttgtcattttttagagcattcaattgaattatataacatgtgataccaataaataattaactttttatttatttatttagagaatgattcttgctttgtctcccaggctggagtgcaatggcatgatctcagctcactgcaacctccacctcttagtttcaagtgattctcctgcctcagcctcccaagtagctgggattacagccatgcaccaccacgcctggctaattttgtacttttagtagagacagggtttcaccataatgatcaggctggccttgaactccggacctcaggtgttctaccacctcagcctcccaaagtgctggtattacaggcatgagccacagcgcctggcttataattaactttaaaaaatattctactatcgaatgcctgaaaaaatcatattacttctatgtattaaaaacaaactattacgtaaatagaccagagatacggtgtcagagatgagattccttggcaacagtctctgagacaaaaagttgcacacagaaagtattttgagaagtattgttgctatttataaggaagtgaaggaggcagtattgggcagagagaaaagctcatccacactgcagttgctactgaggcttcagcccatgtgacagggacactggagctgggatggtctttcagagttctaccaaattgaggcaaatgggcgagacttttgtatctttgcactagccaagagcaggcaccagggagaaatgcagctgtgatccttttgtagatattattattctggagtcaatgcaaccacaccacaaatactaggaataatattggtagtgtgggtgcatcgactccagaagaggatcttgatgaagcattacagtatccactacagagaggcactggcatattctgcttaccccacaaatattgcaatgaggatgcaagtaggagtagtgaggacataaaataaatcgattattttccactgggccttaatatatcagaaccattggaatttacaggatgatatttattatagtactcaaaaaaatctcttttaaatctccttaactcagaagggaattttaaaaagtccacaattcacctggtctatgaattcccttttaaaataaaatgtggtttaatcaaatttacaagaaaaaaacaaacaaccccatcaaaaagtgggggaaggatataaacagactcttctcaaaagaagacatttatgtggccaaaagacacatgaaaaaaagctcatcatcactggtcattagagaaatgcaaatcaaaaccgcaatgagataccatctcacatcagttagaaaggcgatcattaaaaagtcaggaaacaacagatgctggagaggatgtggagaaataggaacgcttttacactgttggtgggagtgtgaattacttcaaccattgtggaagaccgtgtggcgattcctcaaggatctacaaccagaaataccatttaactcagccatcccattactgggtatatacccaaaggattataaatcattctactgtaaagacacatgcacacgtacgtttgttgcagcactgtttacaatagcaaagacttggaaccaacccaaatgtccatcaataatagactggatacagaaaatgtggcacatatacaccatagaatactatgcagccataaaaaaggatgcgttcgtgtcctttgtaaggacatggatgaagctggaaaccatcattctcagcaaactaacacaggaacagaaaaccaaacaccgcatgttctcactcataagtgggagttgaacgatgagaacacatggagatgggggaggggaacatcacacaccagttgggggattggggggcagagggagggataacgttaggagaaatacctaatgtagatgaagggttgatgggtacagcaaaccaccatggcacgtgtatacctacgtagcaaacctgtacattctgcacatgtatcccagaacttaaagtataatttaaaaaatgtggttgaaaaacaaaacccacataatacaaactttgccagcttaactgttttatgtgtacaaaccagtagtgttaactatacatacattgttattcaacagatctctagaatgttttcatctctcaaatccgaaactccaaacccactgaagagctcccattgctccctgtaccccagcactggcaatatgaccactctactttctgtctctaaagagtttaactactttagatacatcatataaaaggaagcatgcagtatttgtcattttatgactggcttatttcacttagcataatgtcttcaaggtacacccatgttgtagcataggaaaggatttccttctttttttgtggccgagtaataatattccgttgtgtcctataccacattttttaatccgtttatcaatcaatggacattttagttacttcaatttttggctattgtgaattatgccgcagttaatatgagtgtgcaaatatctctttaagatcctgtttttaattcttttggatatacagatgctcattgatttacactgggattacatcccaatcagcccatcataagttgaaaatatcatgtcaaaaattaatttaatatgcctaagctaccaaacatcattgcttagtctagcatactttaaatgttatcagaacatgtagattacagtacatctgggcaaaatcatcttgcaacacagtacatagtagagtatcaattatttatcctcatgataaatatcatgctgcaacccaatatgtcagaagagagtatcatactgcatatttactagccctagaaaagatcaaaattcaaaatttgaagtatggtttcttaatgaatgcatatcgctttcacaccattgtaaagtccaaaaattacaagttagaccttagtaagttggggactaaccgtacacccagaaatgggattgctggattatatgataattctatttttattttttgaggactggattatatgataattctatttttatgttttgaggaacttccatacggttttccatagtggctacaccttttcacattcccaccaacaatgcagaagtgtttcagtttctccacatccttgccagcacatgttattttctgtttatgatcgtggtcatcctcatggttgtgaggtaatatctcattgtggttttcgttcttcatttgcatttccccgatgattgacgatgttgagtatgttttcagatgcttgttggctgtgtatatattttctttggagaaatgtctatttaaatccttgcccattttaaaatcaggttaattgtttttggtgaattccttattaattactcacctcagagcctttcttcttaaaatacagatttctcagaacctttcatctaatttactaaatgttgatcttgaagaagtattttaatttatctgaatttagtttcccgttctataaattgatagtaatcatgttttccctatccacaccagagtggtatgatgaggaaccaatgcagaaaatgactaaaaaggcatttttatgctgtccagatcttgtgcaaatatattataattgatttgaaccaaaagaatctacattttaagactatttaatattgtcgcatttacattgcactaatggttcctcttttttctcactgatgaagttctagattgaaactctgaggaaactgtaaatcacagttacataactctgttatattaatttatataacttctctgtctctctctaaatatatatatttagactatatatacatatgcatatatatatttagagagagaacgagattacacttaaggactctgcttagtacattgcaacttgcacctcattctaattgtgaaaacaacaacaaattttgattgagaccctgttatttttcagacctttggtcttgtgaggaaggaaaagatgattctgatacttatctcaaatagcttatcatctcctctggtggatgaggcttgtgagggcctgacacatggtagaggatcttattcattatataacaactttcaaaacacatcactaattatttttctgcttaaggtgaaaacgtagctctcccaaacaaataagagatttagactgaattctgtagaaaacactgcttacctcattttgcttagttttcactgcagagtcttgtctctaacattcaggtaggaggaactctattttaaaaaattgaataaacaaacccaaatcagaataaattatttaattcaggagttttttaaggtgctcagaattttggtagaatagcagtgtattttctgtaataagaactacacaatgttctctagctggttatactcaaatggttatatggattttattctgatatcagttttgcaattgatgaccacccttcatcaatagcgtggtctttattatggtttcatctggctttttcttcccttgtcttctgcactgggctgcctacttcttggctcttattattacatactctacttttttcatatacaaaggtcttagtgcattaatagtgagtttctgctaaaagtgttactttcttcaaatatcctgtcaaatgctggctgcctgatttattgacctcatagagtgactatgtgaatcttccattctctgtggaattccattccacattttaacttaaagactccgtcttttccagctgtgttctctctgctggataagcatttttcttttaatttctgtggtaatgggaagggaattttaaatcctgttttgcgtacaagtgtttaacaggtaaaaatggatgctgtgtcagctatctattgctgtgtaacaagctaccccaaatgtagagacttaaaataagaatcattttttttttttagctcatgattcttgattctgcttggggcttggttcatcgaggcgattcttttgctagactcagctgtgctcattcatgcactcgtggtcagctggtagttgatgaccacatgtggcattcatatgtctggtataactttttggttataagttgagacggtgtgggtgacaggatcacttgcctgtaattattcatcaggctagcatagttccatagcggtggaagagttccaagcatagcccaacacccaagcattgttaagcctctgcttatgtcatgtttgctgatacctcattagccgaaacaagtgacttgaccaatccatattcaaggagtggagaaacagactatggctcttaatgggagaatctggaatatctcttgacaaaagtgtagatgcaagaggagaatctgtggacatttactctccagcagagatgttgtcatttttgtcactaagacagttcctgtgtaatattatttattattccttggcagccataagtttgtggtttacttatggatacttcagtgcctgcccaatatcatgttggaaagagaagcccttaacaatttctcttaatttctacttctgaggaatgagaaaaaaaaaattggataggcataaatgatttccagcacaaattctaagcagctatttgagaggtgggtgggtagggagagatggaaaatccttttaattgagacatgctcaaccataagcaatttttctttcctcaggagacatttggtaatgtcaggagacatttttggttgtacatctaggagggagctctggccagagatactgacaagcaattctgatcctacaatgcacaggacagccactcacgacaaaaaattatctgggacaaaaatgtcaatagtgctgagattgagaaaccctgcttttcactgagcgcatgtagatgaattcatataatgttagttatagaagggcacttagatgatgccaactaaaacaggaaaaggcaatgattatttctctattcaagttagtgaaggaaggatatgtttaaagtcaggttggagatatttctcaagggtaatatttaagttgtgagtggatgccagatgcgcttgattgttacaatccatatttttatagctatatcaaatgatcttctctcccaaattaaaatggatattagatatatttcatggataccatatattataagctatagctcttagaagtatttgagtgattaataattcttgcatattgaatgagacatgtaagaaagatacctgatgtcctatgattcttagaaatatgtgcagtggttaagcacattgtcttggaaacatcacttgttaatgtgagatcctgaacaagtttcgttaccttggtaaaagggggatgataacatctaccctgaagatggtttggtaaaggtgaaataaaagagggtttatgaagaaccttgcctagcacataagaatcactgagtaaatgatgggggtgatggcagtgttggtggcaattatcttacttgtaagtagtagcaaatatttatttggattatatttttaatagcaagaaagaatctattaaaatgtaagcaaatagcaccattaagctttaaaaatccatagctcccaaacttaacatttttttttcttaaatccagaaatacaaatggttatcatgaatccttgagttccagtactccggccttgcctatgtagagtacaagcatttatttttctaaaatgagaattattgatgttaggtgtgtcatatattttatttactctttagagtgacagaaaagaaagcagacaaaaataagtgtttatgtgttcatagtgtttgtttctaattttccaacttgtatgtgcagactgtaaatatttagagggaagacatgaaattcttccttacctacacaatagattgtctttcttagaatctagacatgatttcaaattttcttcagaagttctcttgaattcttacggaattcattaatccaaatgccatcctttcaaatattcaaaaagaaaatattctccaatgttgcttacatggaggagagttattttatctactagtgagatggaagtcgctaacaatctttcttataccccatagtattaaatagtaatgcaatttgatcacatataacattgctctcctgttgacatggaatgataaggaggaagggaatatctaacagcactttttagatattctctcatagaattgttaatgtgagcccaataacttattttgtaagttgagtgatttttcaaatataaaagtgaagcaaacaaaaaaagttacccacattcattcaacaaagctagaaatagagtatgtgcttcttgctttcttatcaaccaaaggagacctgtgaattacaggaaaaccatgtgtgaatacttcaaaggaaatatgccaaacacattgtgtgtgtgttttaaaagatttagtagctcctttaaagctctaagtaaagctgttagtctgactaatcatgtacccctgaaaccaattaaattttcagactagagaagtgttcttcaaacacttgaaaaaaataagagttccttcctaaagccaacaccttttaattaacaaaatactcagagcaaagctgtggtttgcaatagtatattacacctactgttattcatgctaccattctggtgtgccaaactcaattcatttcaactattttgagcttgattttctgtctgcttaactatggagggaaaaccacaattttagtagagtcattttaattttctaatgaatgcatgagaaaggtattatgctacatagtatgtcctcagactattcagatgccctctctctctcttgctctgtctctgtctgtctctctttacacacacacacacacacacacacacacacacaatgtgtgtatctatctgtctacctagatatacagtttaattttgtacattgtaatacatctggttctggcataaggtgattgagcaaaaaacaaacaaacaaaacccacccaaatctgttactggaggaacctttaatagcataacatcagaaagactattttcagtaaggaccctaggcaggaaaagacaattcctccaatggacttgagaagaatacccttagtctctgaggtggttagagaggctgagatctgaaccagctaataccagagccagcttcttgtaacccaagataggggcataagaaacggggtgaatgcccaggcatgaacagacttggggttaagattaaatagggtacacgggaaaggatttccgccagctggaggggaagccatttcccatgctccttagggatgacaacaggagacccagcccagaacatcattgaaaattctatgtaataatttatatatcctaactctttacccgttcgttctagattatggattcaggcactcttagcaaaacaaatcctctttcagtcttttaaaatattgacttaacaggaaatatccttggcacaacaatacgaccctgcctgacccttagaactgtgaacaggttgctcagactgtacaaaaccactaacaaatctgaccagcctacacttcactgaaaaaggtgatttgcatatatttctagtactatgacatggtggaaaagaaagaaccgcatatgtgttagataaaggtaaacgcatctgaaagtgcagtaagaatcaatgtgatatatacaataaaataagataaataggccgggcatggtggctcatgcctgtaatcccagcactttgggaggccgaggcaggcagatcacgaggtcaggagatcgagaccatcctggccaacatggtgaaaccccgtctccactaaagtacaaaaaattagttgggcatggtggcaaatgcctgtagtcccagatactcaggaggctgaggcaggggaatcgcttgaacccgcgaggcagagattgcagtgagctgagatcacgccactgcactccagcctggcaacagagcaacactctgtctcaaaaaaaaaaaaaaaaaaaaaaaatttcaggacttcaaaacttctgtcctttgaaacactttgattaaaaaatgaaaaaaatatatacatgcctgaatccagaggcaagtctttttagaaaacataaaatattttaagtaatgtttttctgaacagaaatggctctaatgtgagaggtcgatgaagattagcctcttgcttctttatgttttaaagtatattccttgagacccaaagtttctgactttagaatccaactctcaactactatcagctatcctctagacactttcaaaatcctccaaaacctaatagtggtgcaagattttgtccttcctagtgataactagatttaagtaagaaaacgttaaagactaaaaagtgtttaggacccacaagaaaggtgtaattctgttcctcatggagatattttagttacacacttcttattctggtcctccccaaaacacagaaatctagagttgacatttaaagagaaaatgagatttttgtctggaaacaggagagaaaaagttttcaagaagtatagaaagcgtatgaaaggacacaggtttgaaatggcctgtgctcatgagagaatgcacaatagacatgggtgtggaggagcctggaaagaatggagagaggtaagtctggagggtcaaatctggttcagagtacagagcataaaatcccatacgaatgtagaacatgaggagccaataaccattgtgtgagaaatgcaggaaaaagaggaagaaaaaaatccacatagtgtacttacagtcagaacaatcctaggaggtgacttacatgtatgatgtcataaaatccgtaacacaattccattagattggtactgttttcatagttacacaggtgaaaacttttgagggtcaagatgttcattgtagcaggcatagtataattccttacctcaagatgcctccaatgtcagtgaacattacttttccaagattgtctatttaggaaaaagtaaggccagttgtctatgaaggaagtactattataatcgccactttacagaggagtaaatggagattcagagaggttaagtcatctgactatagttacacagctaaaaaaaaaaaaaattatagagcaaggattcaaatacaacaatctggtcctagaaagcctaaatattctacaccctgctttctgattcagagctatttcctgcttttctcccttcgataggaaaaaaaatgtatgtgtgtggggttgggggcaaataaattgactggctgtattttctctctttaatatttgatctttcattgtctgctccaagcagtgggtcttcctccattatcttctcgtgaaaatagctaaaatcacctaactagtaaaaacctaggcatgttttgtgttctagcctccattcttccattctaatgggtggctgttaaattttagtactcattgtatgtagaagacctctaagttcactaaagagcttactgcacattgacttttctttagattcaaagggaatcaattgagcacctcctatactccaggacatgtgcaagatgcaagagatagagcagtgagaaagtctgataaggtttcccctccctttcccagcagtgtacagatagatgttcttcaggtggtgcatgctggagaagagaagaccagaaatactggcctgacgggtctatagatgagattatctgcccatgactggcgcagggatggccgcattgctagacctctccatcatcctctgaatatgcttcagctaatttatcatcccaatggcatatttagtcatcatgaaccattctctctttttgagtctcaggccctggccttgcttttcaatagacttccaatagattccttcctccttccttcccttactgcctggcttcctgacttccttccttcctgccttcctgccttgtcttgccttgcttttcaatagattccctccctccctccctccctccttcctccctccctccctccctgactttcttctttccttcttcctttctgtctttttccaaacgtgcttttcaggaaacagtggtctgcttgttgaagtctgataattctctagttcctcatccttcactttattgaaatttagtgtgacatgatcatttccacctcattaggtacttctttcatggtcagaagtaagtctggagaaaaaaaaaaaatctcttgtctctgctcttatttgagggtcaaattttcaataagtcactttttaaaaaagcattttctgacacttcccataagcttgaaatcctcctaaattgctgtatattgcctcagtataccttgtgtatctattttaggaacactccatccacatttgccagtcagcctggtgttctgcagttagttcctacagtgatattttaatttagctctcttttcatcctcacacatgcatcctctctggatatttagctcctttcctggaatcccttttaagatttctagatctttttgcttccatgatttcttctcctggactgtgacacaaaatgctatttcttctttacattacatttaattctttctagaaagagcctcagagtagtcagatagctttgagaaacaaaactttttctttattgcctcactgttactgcctttcaatcattgtttcgtgacacaaatttttttattctctctgacaattaaaacactatttttttctgtctgcattgatcaaaattagttccttcattcatagaaaactcttggtgtccctgagaagcttgagagacaagaaacattcttccattctactcatcttcttctctaatgaggagacaaccttaaaagcacagttacatagccataaaaattaatgattggctacctcagaatgaaaattcaatgtctcatttttttttaatattcttagaatcgttcactggttgtccagtgtgagtctcctgttgagatgtcttttgcagctttccttgaaacctttcattccaaactacatagtccaataattttgccaccaatcttctggttatattatgctcttgagtctgttgtctataaacttgattaggcattccttcccctcaccactcacctctgataacccagctgtgtgttggtatttagtatcaattcacaccagcaagttcagccctcttcaatcaatatagggccacacacggacttttgactgactactccccaagtatttcacattttggggccttatctccagtttctcaccacagttgttcatcactgtgtttcttactagccaggcgtttataaaaacagtaatacctaacactattgatcacctactatagtgtcaggcgctgtaataatattattgtgatgatgatgattatgctgctctttctggcattgtcatacgtgtattgcttgtactactcactgaatctacacaactgcccttatgacatttaccctgttattattcctcttttaaggtaaatacatgaaaaatgcttcccactttgccttgcttactgcttattgctagtactgaacaaatgttagaactgaaacttagagaggttatgtggctttaccaaggtcccagagttcctagggcagagaacaggattgtctaccagacattttaattctagtactatgcatcttaaccattaccataggctgacttactctacagtgtccaacactattcatattaagatttatttaatgactttgaaacagtatttcatgtctaaatagaaaaactactaactcgcatttttaagaaaatattgtatcttggtttttcttcactgctggccagtttactaacaatctgaaataaaaagaaaaaaatatgataaactgctcccagtataaaatacagagctaagacaagaacgtttcattggctttgatttccctagggtccagcttcaaattaatttacttcctattcaagggaattttaaatcagaaagaagatcttatcccatcttgttttgcctttgttttttcttgaataaaaaaaaaataagtaaaatttatttccctggcaaggtctgaaaacttttgttttctttaccacttccacaatgtatatgattgttactgagaaggcttatttaacttaagttacttgtccaggcatgagaatgagcaaaatcgttttttaaaaaattgttaaatgtatattaatgaaaaggttgaatcttttcattttctaccatgtattgctaaacaaagtatccacattgttagaaaaagatatataatgtcatgaataagagtttggctcaaattgttactcttcaattaaatttgacttattgttattgaaattggctctttagcttgtgtttctaatttttctttttcttcttttttcctttttgcaaaaacccaaaatattttagctcctactcagactgttactctggtgacacaacctgtggttactaaggaaactgccatctccaaactagaaatgccatcttccttgatgttggaggtacctgctctggcagatttcaaccgggcttggacagaacttaccgactggctttctctgcttgatcaagttataaaatcacagagggtgatggtgggtgaccttgaggatatcaacgagatgatcatcaagcagaaggtatgagaaaaaatgataaaagttggcagaagtttttctttaaaatgaagattttccaccaatcactttactctcctagaccatttcccaccagttcttaggcaactgtttctctctcagcaaacacattactctcactattcagcctaagtataatcaaggatataaattaatgcaaataacaaaagtagccatacattaaaaaggaaatatacaaaaaaaaaaaaaaaaaaaagcagaaaccttacaagaatagttgtctcagttaaatttactaaacaacctggtattttaaaaatctattttataccaaataagtcactcaactgagctatttacatttaaactgtttgttttggcactacgcagcccaacatattgcagaatcaaatataatagtctgggaattgattattatccactcttctaagttgtctgtgccaatttgccttctccaatgataaggataattgaaagagagctataacttaaaaagagaaaagtaacaaaacataagatatttaaaattaccctagatcttaaagttggcatttatgcaatgccatgttcaaatgaacatgtttttaatacaaatagtgcatttttcagcctcagtgtaatccatttggtaaaattatgacatcaactagaaacattagaatacattgatgtaaatatggtttacctagctagatcaaatatactatatatcttttatatttgtgaatgattaagaaaaataatgttggaattgttatacattaaagttttttcacttgtaacagctttcaagcctttctaaagaaatacaaagttgtgctgaaggtatttaggtattaaagtactaccttttgaaaaaacaagaagtgaggcagacagagtaaggggaatttctttgtaaaataaacttcaccaattccataggaataaaagtaatttgatagtaaacaacctgcatttaaaggccttgagcttgaatacagaagacctgaattcagtgccatttgcaaatgatgattgtggtcaagccatctctggatcttcgtttcctattctgagtacagagcatacagagtacacattcacattcacaatatagttatggatatggatgtatataaatatatgtaaatactacatatatgtacctaaaatttgttttacttctgctttaaaaaaagtaattatagccacatttttcagaaaaagtaactgaggctcatagatgtcaaattcccagtaagtagcagaacaaggattcaaatccaagtccatttgattcctaagcttgtgttattacttgctactgcagagagtatacgtagcaagtaatatatgtactgcaagcaatacatactattgctgcggtaataactgtaactgcagttactatttagtgatttgtatgtagatgtagatgtagtctatgtcagacactatgctgagcattttatggttgctatgtactgatacatacagaaacaagaggtacgttcttttacaataccatattgagttatataatactcccaggacttttatttaccaaaggaaacaatattttataatgtttaaagcccaggttttgaagttacattgtctgggttcaaagcttggctcccaagctgtgtgaccttgagtaagttattctgcctacctgagcccaagtttatctagctataaaatggggatagttgtactatctgccttgcagtttgtcatcaggattaagttggttggtacatgaaaaatgcttcccactttgccttgcttactgcttactgctagtattgaacaaatgttagtaattatatttggttccaccacgaactctagaaatctaaccaatgatggcatttgtattatgcaaactgtatatcacatcataatattatatggaaatgagagcttgtttccgcttctgtagcctagtctaccattgacatagcttcctgcagaagttaccagataatagattgggagagaaagtccacacttccttgtgacgggtttgtgagtccagcatttagggaagccattgatgtgctcagtagtctccagagttctctaaataaatgtgtccttttcagaaaggactactgatttgatgccccctcacagagatcgtctttaaatataggtcaaaaactaatgtagagggccaggtgcaatgtttcacgcctgcactcccagcgctttgggaggctgaggcaggtggatcacttgaggtcaggagtttgagaccagcctggtcaacatggccaaaccccatctctactgaaaataaaaaaattagctggtgtggtggcccatgcctataatcccagctactagggaggctgaggcaggagaatcacttgaatcctggaccagaggttccattgagctgagatcacaccattgcactccagactgagtgacagagtgagactccatctcagaaaaaaaaaaatttagggggaaaaatcaaaagccatttctgagacacaaaaatacaggatttataaattatatatggtatatataaaaatatttttaaaatagtatatatagcatattatatataatgatatgtaatgttcatatattacatatttataaaaaaatctaatctcccttctcttgcttgctgaatagggggatgctttgcctgcctcttcctcttatattaaaaaataattcttaaagacattgtcagttcttggcttttatagcctcaatcaccaaattgtcggtaaaatggccctaaataatcattaaacaaatgtgtgtgagaggggaaataagaaggataagtaagtatggggaggattttgttataatttcaggaaatcaatatcaattttatgtaaagttttaaataaagcaatcccaactttaatgtttgatgtgtgaaaaattaggcaaaattccaaaagggctttataaactgaaaaaaactttactaacacctatccatttttattattttaaccaacttctattgagctgccactaagtacctgggaaacataaagttgtacaacatagaatgtgcaggtaaaagaggttgaaggaagaaaataataacactatgatagagataaattttaggataatagctaacacatatgatatgccagtcattgatctaagtacttcacgtgaattctttaatgcttacaacattactgtgaggtagatagagaggcacagtaaggataataacctgcctgagatcgaggaagaaagacaatgatgagatgtgaactcaggcagtttggttccagagtcctctcccttaaacctcatagttttcaacttctctgatattgtgtgggtgatgctgttggggctttcttcagggaaaactaagccaggagagagaatggatgctagtgagatattcctgaagaaggaaaaacttaagccaggcattaaagaatgagttggaattacctagctagataaaacgagaagggcaatccaggcagagggaacagactgtgcttttcactgaggtggaaaaaaaacagagtatatcagaggaattgtgattccatatggctgaagttaagggtatatgatgaggaagaaattgatgaggttgaatagagaggactggggctaaataatgggaatcctttgttgccagactgaggaattttgatgatggcctacaggcagtggcaactctgaaaggattgtaaacaggaaaataaaatcatcacatatagtttagttgcctatcaattagagctctctggatgcaagcaacagaaatcattctctgattaaatcaggcagaaagtaaatgtgctgtaattagcacaaaggcattggaacaaaacttacaaaaggaaaaagaatctgagcatgcctttctgggcatgtggctagcaagaagtattccagtctgtttgtgatactctcttttctccatcctgtgtgtaactctgttcaaattttaaagtcttaaaagagagtccagttcaccttgtttgggtcacatgttaatacatgagctagaagggagcagaaaactttgatttaaatccctctcctcccaaagtctcaaaattagggaaaggcaattctcctgaatagaaactgggttctattgacaatagaagaaggaaatgattctgaccaaccactaaacaataattgtccactgaactcagtcaagaacatgtagaataagttggaggatagagcaaataaaggagatttgtaggaggtaattattatgatctaaagcaagcttgttcaactcatggcctgtgagccacatgcgtcccaggatggctttgaatgtggcccaacacaaatttgtaaactttcttaaaacatgagatactttttgtgacttttttttgctcatcagctatcattagtgttagtgtattttatgtgtggcccaggacaattcttcttccagtgtggcccagggaagccaaaagattggatacagctgatctaaagcaacaggttcatctactcaacttcacaacgtgtagacctgaaataaagaccattcatataccaatacctgaaatataaatttgtttgaccatgacacgtacagtaattggttctcaataaatgtggatagcttgatggataatgtgaatgcaatgtgataaggaaacttcatattcaacaaagactggaatgtgaggattataattccaaagcaccagaagatagataagataatgcaatgagacattttatgactcaaggcaaagttagttatgagattcagaccaaaccttagacgtgcagtaattgaaatatttgccacagaaggggtataaggacatgacattcaagtaagctaacctttcactagctttagactttgaactcagaaaacatatttggtgaaaagcttatggtcccctttagtatgtattgcttgattaaagtattattttagaaaatggtgagctgcttccattttgaaataaaaataatttttactaagtgaattatattcagtgaaaaaaatggaagctacaattacaactttaatttttttaagttttaagaatacagccatttaaaaaaattaagcaaatctgcttcattttagacagtagaaaatataccattatcttttagaagaatagagatgtgaaatatgcaaattaagcctttagaagtaaagcacacatgaagttcaaagtttaatttctagaattgtgaatcaatagcagtggatgatttgtactttatagcttagtgtcggagaaatctgattaaaaaatgctttttctgtttcatcacataaacataagtaaaattgctctgaaacaacaatatttgacaagaattagcagttttcttttttgacataatctatcaaatgaagggaaaaatatgtcctgggttttgctttgagagtgattactaaatctgacccttaaggaaaggaaggagagaacaaagaagggaggaaagaaagggaaggaaggaggaggaaagggaaaaaaagaaggaagagaggaaggaaagcaggaaaaaggggaaggagagagaaaagacaaaagaaaggtagcaaggaaagaaaaaaagacaagaaaggaatattaaagaggacaaaagaggagtgaggaaaggaggaaatggaagagggatggtgggagacaggagggagaaaggtggagggggaaatatgaagagaggttcccagcagtggagactagtgttgctatcaacaaatagaatttagatggccatatgatattatttttcataatactggtgtctgattgcctgtgctgagttaattgtagtcttttttttcaattccgtttggccaggtgttcaggataattcaccacaaaatctcaaccactgcacttgtattgaataaagaattgagttggcaaaggcattttatcctccagtaagacctttccagattggggttgagacaaattggccaatctggacaagatgataatagcattgttcaagattaatttttaaccacacattgcactgttacctgggagatttcattatctaaaaattgaatgagcagttttagtgggtatagtgtatatttaaatgggacataattacttgaatgagtttaatttttgttgttgttgttaaggtcaaagtacttaaaaattatgattttttaaaactctgtctatacacaaaaagcatttgaattagctacagaataattctgattataacttttggtgaatagattcagtcaaaatctgattactaaacaacttgtgtagtatagccctggaagaattgatgggacaatgtgtgggtaaagtggcattggctatttaaactaaaagcaatacaaaacagaatgtttcttggttttattctgttgtcacaaacccagcagaaagtggctattacaatagtttcccttattcaacaaatgagagaagttatagacaatttagttaattgatctaaagtcacttagtaaatgtaattgtcctaacataaacccagacccccagacctcttgggaatagataatgtttcttacttcttttctatttcctcagccacccccctcaacttcttacacatctcatttctccatccaaattataacaaaacaaagcaaacatggtttatttccatgggcatcaaatggatttcacgaggttgggtgacagtcatcttagggtgaggagattgattattctgtttttctctttcatcgatcaacaatccagcccttctcatctcatcatttcatttctgcacaaacttgtttaagaaataccaattaagaaattaattaagaaattaatgttgtaatctgtttggctgaagatatttacaaattttgtgctttaattatcttccaacaaatgtacatgtctctggtagacagcttgcgaccatctggatgactgatccatatttatataattttctttctttacctaatgagaccaaatccactattatcttcaacgaaggatgtaaagatatgtcagtgtcagtaatgtgacttattttatattctctggtcataacaaaaataaaccgccccttaaataaaaaggtcatagagttgcaaacacacacacacacacacacacacacacaaaatcatattttctaagtctcctaattacctttttatggaaaatgataccatatgcttttttcttaaagaaactacataaacttataaactatactaaactacacatttcaaagtctatgaatggaaatgtgtatcttattatattttaattcaattcactgtaaacttttctgtcaaaatcttatcaagcaaaactgatccaggatatttacatgaattctgatggaagtcactgtactgtgttttccataaaataccagtgggattctgataaggaagtttatgtttgccattgtgtttaaatagagaattctgggccgggcatggtagctcacgcctgtaatcccagcactttgggaggctgaggcgggtgtatcacctgaggtcaggagtttgagaccagcctgaccaacatggagaaaccccgtctctactaaaaatacaaaattagccgggcgtggtggcgcatgcctgtagccccagctactcctgaggctgaggcaggagaatcgcttgaacccgggaggcagatgttgcagtgagccgagatcacaccattgcactccagcctgggcaacaagagcgaaactccgtctcaaataaataaataattagagaattctatttacaaatttcctttcttggatctagttagggctcctttatatggagtgatttttattgttttcatagaaatacgtagaatctgggtcttctctaactttcttacaggaaagcaatgtaataaggtttttttttaattttctgaaagttatataatgttattgttccctaaagtttaggacctgccttttaggctttccatttcaccataacttttggtccttaaagtctgtaattgaagttacagtgtgttatgatgtaaatttttcttattattacctttaatgttagggtaatgttaactaatgttaatgttaggtatatggttgtttttttcattccttcgttcaacaaattgtctttgaaacccatgttacaaagcactctagagtcaggttgaagactattaagaaaggagaatagaaagagacactagagtaataatttggatttaaatttgatttccttgtgtatgatagtgaataagtgtgaataagatgaggcagtgatcacacatcactattagtaaaagtgtttctgtacctgtatccacacttttatgtatatggttacttatgttaaagtgatacatattatataaaattaacgtatacattaagtagatattttaatagtctgtaattaaatactactagtattttctttcctccttcaagtgcttacttttgatacctcgagttacagtgtcataaagattctttagaaatatattgactgtcttttaagagcttttgatacaatactgagtttacattcatctgttatttattgaacacttgctggtgaaaggcatcagtgttatctgctcttagggaacaaaaattaaaaagggataggccctaattttagagtgtatcctctataagaaaaacataaaagatagggcagtcatggccacaaaagaaaaaagtgttatggtggtttcaatcatatatgtattagaatgaataaatcaactgatcaattgtgatttcttattctaaatatgtgcctgcctttttcatatagatgaaaattaagctatgtttatctttccagggatcttgttgatttttattcaataacttgggagtgaaagttgatttttgcatatgttttaatgtttttaaatttcataaatgaattgatcagtaatttccaaggtagtaatggctgcattgtttttgaaaaaaaaaaagcaacaggatttgattgtgcttttatgatttttaaagaattcattaaaaataatgccacggtttctaaaatgatttgagtcaatttcttattcgatttataaaaataactttgaatacaattttagtaattcacaaatgctttcagttcccttacctttatattttatattctgtgtaaacaagtgacataatatttaagaattatatatctcctatgatttattcaagaaaagaatatatactgtattatttatttcaagaacagaaatgctttgatttaactgtcatcttctctcttcaattatggaagcaaaataaactgtaatgaccaatgtaacccctcccccatatcaagttaatctatgttcaactccagaattatttttgaacactcaaactagaaattaaaaaaaattaaatccatgaagacgatttttgccaaaagcatatagataaattgagttgattctatacttaagaaagtggagaggagagagtaatttggagagagtaatttactcttaatcccatattttttccctaaatgtgaaagaagtagattgtagtgagagggaaaataacctgtagcaacttcattgaggctaagctttctgtcatgttatattatacgaaagtaatgaaatgcttccacagatagaatcagaagtcccctctgagaaattctacataaaaattagcctgccactttaccacacttactcaagtttgatttttttaagttatgtaatagatgttaggcactagaagaggacatttactgggggcaaagatcagtagttggaaagaatgcaagcaggcaagaagctatatataatgagattttacagtacaattgttttctaaatgaaaatgaggacgggtccagacacaatggctcacacttgtaatatcagtgccaggatggaggatcccttgaggccagaagttcaagagcaacctgggcaacagagtgagacttcatctctacaaaaaaatgaaataaaaagttagctggctgtgatggtgtgggcttgtagccttagctactcaggaggctgaggtgacatgatctcttgggcccaggagttcgaggctgcagtgagctatgatagcgccactggattccaacctgggcaatggaacaaaactccatttctaaaaaagaataaaatataaaactaaaataataaataaataaaaatgaggatatattttattttaacatttggaaactttgtaggtgaggaccatgcaaacattcaaggtgtgagttctgaccaaatccaattattaaccataccaatgacttaaggtttcttcacactccttaaagttgattaatataatgattatatagttgactggtatgtcacagcttgaagcctttgagatttattcctgccttttctgtaaaggttgttttgttaattccagtatgtactggtcgtttttgttttgttttgtttttgtttttgttttgtttttttgagatggagtctcgcactgttgcccgggctggagtgcagtggcacgatctcggctcactgcaacctccgccacctaggttcaagcgattctcctgcttcagcctcctgagtagctgggattacaggcactcaccaccacacccggctaattttttttatttttagtagagatggggtttcactatggtggccaggctggtctcaaatacctgacctcatgatccacctgccttggcctcccaaagtgcggggattacaggcgtgagccaccgtgcccggctgccaatatgtattggtctttttcatcaatgattcagtccaaaatcattttgtcctttaactatatattttcttgtaaagctgcttctgttgtcttgaacttttcttttcaaatgtatgttgtcatttgactttttagattgttattttctggtcctcgaaataaatttaaatttcctgtaaaggaaggtgtaatattctatttgacatagccgctaaagatgtactaggtgctttataaatattgttgatttactttatcttcacagattactagttttacttagtatttggaatatgacaacattttatagagctatattcatatatatgtttatcttaactgttaaatgcaatatgattcatgtcttgttttggtcaatgatgaatgaaagtctcctgagaattaaatttactgcatcgatgcaaaaacaatcataattttagacactctaagaattttagaaattaaaggattttttttttccagtttactctgttaagattgtgtttagctatgcgtgacagcattctcactacagtggcttatccagatagtttctttttctcatagagcaagacttccagaattatgtgttccagggtcagtgcagcacctccaaaaccgtatgtcccaactttttcctccaaccccagtcatctccaacatgagactttctttttgttttgttttgttgtttttgtttttgtttttgttttgagatggagtctctgtcgccaggctggagtgcagtggcgcgatctcgactcactgcaacctctgactccctggttcaagggattctcctgcctcagcctcctgagtagctgggattacgggaacgcaccaccacgcccagctaatttttgtatttttagtagagacggggtttcaccatgttggccaggatggtctcgatctcctgacctcatgatctgcctgcctcagcctcccaaagtggtgggattacaggcgtgagccaccgtgcccagcaagactttttttcctgtggtctcaacatggctactctgcctccaggcactatgtctgtactttaaaatggaagaagggaaaatggggaaagtaaaagcatattccagctgtgtcagctcctgtttgtaaggaaaaccagtgcttttctggcagccccacacagaagagtttctacttgaacagtgcattaaccagaaatgtgtcacgtgaccattcctaacttctaaggatcttgggaggattgagtgttttaactgaataggtgtgtttctttcttcataattcaaaatgtgaaaattggtaacttagttataaaaccttgctagtctgaacagaatttggatttttttagctaagaaggaaagaaagggtatcggataggcagctggctatgctagccaagatactcttaataatgcacatttttcttctttggacataagcagttttaacttagctaaatatgatgtgattgttttcctgtcttcttagttctgtttaaatttgtttcagaaatcaaggaaataaaatggagaaaaaactctattattcatgtctatctttctgcctctgaatatttttatgttggagaaagagaaagcagtaactttcataatagcttacatagtctgacaaattctaaacatgtccgttagcatcaatatacgtggtattaggtcatcagtttttatattctgaattattaagacccaaataaacccactgagttcaagagaaagtatacactgagcaataaaaacattaccagttctagcaatgataatcaaacaagaaaacaagtaatatagtctgtttagaataacatgttttaaagatcaagtttttcttccttaccaatgttgcctttcttgtaacacttttttttccttcttgagataggctttcctatcttttgtcacaaaccccaatatttacatggccattcgtagtctattcatagcagcaccaccccatggcccaaacttgtagatattgccctccttctatggttgttctaataagaataaccactcttgtctctcataatctcagctgttttgtgccgttaaaatggaaaataatgagtattaagatactaactaggggccaggcgcggtggctcacgcctgtaatcccagcactttgggaggatgaggcgggcggatcacgaggtcagaagattgagaccatcctggctaacacggtgaaaccacgtctctactaaaaatacaaaaaattagccaggcgtggtggtgggtgcctgtggtcccagctactcgggaggctactgcactccagcctgggcgacagagcaagactccatctcaaaaaaaaaaaaaaaaaaaatactaactaggtttcagtcatatgagatgaataagtcctacaaatctgtacagcctagggcttgtagttaacaatgttttatatttaaaactttgctaagagagtaaatctttttttacctgttattatcgtacatgcaaaaataatagtaaataaggaaggtaagagaaaaattttggaggtgatgcataggtttatggcatagattctggacatgatttcacaggggtatacagtcatgcattgctcaacaacagatatacattcggagaaatgcatggttagctgattgatcttgttgtgcaaacatcatacagtgtacttacacaaacctagatggtacatcctactatacatctaggttgtatggtatagcctattgctcctaggctataaaccagtacagcatgtgactgtactgaatacttcaggcaattggaacacgatggcaagtatttgtgtatctaatcacatctaaacatagaaaagttacagaaaaatattataatcttataggaccactgtcctacatgtatacagactgtgcacatgatagtggtccattgatcaaaatgtccttatgcagcacataactgtaattatctcgaaactcatcaagctgtgttcattaaatgtgtatagctttttatgtcaataaagtggttaagaaatcaataaagtggttaaaaaatattttgactaggaaatatactatcatttctagttgataaaagatctcaacatttccaaaattgtcctacagaaaaccaggttcatcaggtgttcatacatgatcctcatgaaaaggtcaaataagctgaaaaacatgcatagacgttgcctatcctagcaatctatgatgtacatctccatagtaaggtcactgaaaagtcttttaggaatgttagtattgttagctcagtatttctcagtgatttctccatggaaaccatttgtgtagagcatcttgaggagcacagctgagagaacattatcttagttggatgtgtatgtccctctgagtcacttgatttctctacatatgcttttaccaaattaatcttttagaaatcttttctcttcgcactatgtctataatttgtgaagttgttaccaggataacatttgtgcctctcaccatgatgtacctaccagggtccaagcagccattccttctctagagcaactgtctgagggaaagaatttaacacagcattctacgaaatcattttatttataaaaatagattactgctttacatatagtaatttatatttagaatattgattaattattaaaatctgcatgagagctttaaagagtagtacataatatatagcagtttgtactcaaactgtcttctaaaaaggattcactttttgtttgtattctattgtcctattcgttgatagtgttacgtaagtaattataaaacttaaaatctggaaagagaatgtggactcagaatgccatctcttttgttatttcaaatggattagaaatgaacatacatattcattttctttcattacacatccagagaaatagaatggattttataaatatgtaaaagcaaggattttgatcactgataaaaagggaaggtttggtcactaccttatttcattccttttttcttatccttttttttttttttgtcaattatttgatgacatctctgaacatcaccttttattcatgacaagaattgggtatcatggtaaagaacactgttaatataattcagttacttcaccccctcctgaaatatagagaagctttaagactatgtgaatatttttttctggttttcttgtatttgtagaaatagcatgagctttgtttaaagtcaggcatctaaaaccttgccctgtatgttattgacaacctgcacaaattttaggatctattctattacagtttgttcaactgtaaaactaggatagcaaactctatgtcatattttcgttatcagaatttaaaaagcatgttttaagatcttagtaaataataaatctctactctgtagttgaatttgttctatattctttaagaaattccctttgatggttatgccaacctctgtattacttttcttcacactttaactttgcgctgaaatcatagtagtattttacgttatcagtcaaaataacagtcatccttaaaacaaatatgaattttagatgattaaatagatttgtatggaggttcttcttgctaatcatagcagttatccttggtgaaaaatgatagacacttgaaaaaaccaattaatcatgatggctatttttgcatcataaataaagctttcaaatttgagagggaatcaaaagggcaatggtagtatagtgtctcaaagcccctttccaattgatggtacaaatttaaaaagagagagagagagagaaacatgtttcactgtaattgttttctaagagcttccaaaaaagcgtattttcttaatagattcaaatttttcagttggattgaaagggaagtcttggagtgtagtgaggagggcaccttctgttgagaggtgttcagacgacagagtgtgcccaaggccaaagatgagatggttttgcgaaagtcagtggccacaaacaggtgtgtttgacccctgagagatatgcaggaagtctaccccactttaattcttccaaatattctttaccttaattcccaagtacttgataaaggagcaatggggagaaaatatgcacactattatggaaaagttttgacctacactttggagagttttagattaagagcattctagaaatcagtcccaaatgcctagggtttacttacttaaagataatatcatagtttgggtgactgggaagcataccctgagattgaggtgagcatgcagtatgtctatttaggagtgttcttggggtcaacgtgtaggggcagagggagaagttgagctctgacgcagtcttagtaagggcctcagctgaccgttcagggagttcttaagctggaatgacccttcagaagtgctaggaaacgaagaaaggggactggatctttataaccccgtgtcaagtcatgcactggatgtgggctactccaggaaggcaacgaactttagcaagatgattctctttagccacgggaatttccataagggggctgctatggtctgaatgtttttgtccctccaaaatgtgtatgttgaaacctaacactcaaggtgatggtattagaaggtgggggtttgggggggtgattaggtcatgcgggctctgccttcagaaacaggatcagtgcccttataaaagcggctccagaaagcttccttgccctcccaccatgtaaggacacaccgaagatgccatttaacaggagtgggccctcaccagacaatgaatctgctgatgtcttgatcttggaattcccagcctccagaactataagcaataaattctgttgtttataaattacccagtctaaggtatttagctatagcggcccagactaagacaagggctgacagctgaaggctgtctaccagcagcactcctagcagctggggaactaagtccttcatttccaaaggggaatctaggcagcatatttacagcttttcactacagataagctcattatttcaaatagggactagcaggaaaaaattaaattgcccaaaatttagtgggatgctgaaatagattgtggtgtgtaaattggagtatagtgaggagagcaccttcaaaccagtatgtactacatgatattgtttttgttgcaatatttattatatacccaaacacacatatattacttttagaaacacacaccacatatatatctatgaatattttatatacacatagggaaggattgttgatgttatttatgctattttaaagatcgatgttttcatataattatgtattggttatatattatttcttgatataaggtaaaaaaaaaaagcaaaacaaactttaagtgatcactatgaaaagaatcccaatgctgcacatttaggtttatccaactcttcccattaaaatattaaatagtagaaataattgtgaataagaaagagcagattttgaaaaatggaaagaaatgcttaaagacatagcattgttgcccaaccatcattatttaaacatacagtgtttggctttgaccaaattgccttcaaacacttccttttggcccaaaatgttaggtcatatatactaccataaaattcatgatgcttaccatgcattaatttctagtatataccaggcattgtgctatgcatatcatattcaatatttctaatcctctcaaaagtggtacaagctaactggcgtttttcttgttttgaaagggagaaactcagagaggttaagtgacttgcccaaggcaatgccattgataagtgccagattctatcacaggtttattggcaacaaaccatatgtgcgcgtgcatgcgcgtgtgtgtgtgtgtgtgtgtgtgtgtacacatacacgaataacatatatggtataaatacgtggaaacataataaactgcattgagctgcgtttataattagtatttaggacatgtttggcaaataaaaacagtggagattgaaatggatttgcttaggaaaaatgatacattaaaataggctttattatgagtcttcaactattctgtgaaaatagatacccagggaagaaataatagagaatatgaatcttgagcaggcaactgagaacttgtcgaagagccaagataaaaatgtcagagaggagaatattttggcagctcagatgagcccccagagggtgggaggcaatgatctcaccgcagtctcgtatctgaaccccaggtttttgcatctccataaagtaatttcttacacccctcaataatgatcgggcttactctcaatctctcgctctctctctgtgtctctctcacgcacacaaacatgcagaacatttcttgcacatgcataactcataagacgattatgtaaataccagcctttttatttcataactaaattacaaggcctggttattgtttggactgtgaaaaaataattatgtgaataggtgcctcaagatgaaagacaaggcaagattgtgaaattattcatatgatagtaatagtatgcaaaaaataacacaatctttaaagatctttaacgacctagttataaaaccatgctttataacaaatataaccatgaggaaataaaaagaaaaatgtaataatatactccaagaataaagtcaaatgtattgttgaatgtaaggagttggttacacttccttatagtggaggttattttaaaatttgtggcttacgtggtgttatgaattgccctagatcaacactattatgcaaggccaactattaggttatttttggtagataaccacagcaaaactttagtataataggtaaaggttagctacactcccataccctcactctcaggtgttgtcatactccgtataaaaggttcaatcaagggagacatgagaatattccagaatctagaggcaggatgcagttaaccttagagaaggcatcagacaactagaatcttcggattcaatgtggaaacaaagcatagtttaggcattaaatcttgggcaccattccaaagaatacaggttccataacttactatatttttatacctagcaagctagagatgaggaattgctctcaaatattttaaccaaagcatgtatcttaagtaacactaatctcataagtgaaaactcatttctaatattcattttgctcattagcaaggcctctagtgttgactgtgataaaaaatagttcaaatgctggtagaacccaccccaggagactggcctttctgattaaattctaactctatccccacgtgaattcctgacttaagtaactgagttcctgcacatcagaatataagtatattatagatataaaaacatatgtaattaataaatattttaagtgagacacttctttcatctttatggcttaactatatcagacatttgattatttttagcggtctaactacaaaacaaaacacaaagcccacaactaaaaatttctttgtatatattgcaaagaggcaaccatttggtgtcaattcaatcatgagtgaaatgctattatacgagtacatctccctggcttgtatgggggtaatagggcatggaatttacagattcacaataactgagatattcacaataacaaagatatcaatatgtagcttttcccataactttgtgtaatgaaatcctcagtttgtgctgtgtaaaaagcttattgtttacttctcatgaaaatcatcttagtttttatctttatttaatagtctgtaatttgggggtaatacattcgttttgttgatactatgtgaagtggcaagcagaaaattctaacaggaatagataagcaagtatcctataaatcagagtcagtgtctctctctctctcttttaatgagtcagtctgtctctctctctttttccctgcctggctatctatctgtatttttcagttttgctttgcaaataagagaattgtgtgttgtaaaccaaccaacttaccattaattttctctgaattcaaaagcaattacaagcggactcttgagtttgtgctgcctggttgtctgcatataggccagatgtctagaataggatctttatttactatttttaccctcctaatttcatggtaactccaaggtagatgatatttgtaatcgtacactacttgtcagaaatctttctaataacactgctattttataaaaataaacattaattcagtataaaattttattttaaattgttaattcaagcaaatcagtgaggtaacttttacactgccgagcgtacgtgtgtgtggattagtacagccatgccatagacttcacttgtaatcttttctttatattttttatacacctgaaatgttcatcattgtgctgtagaaaacaatctcattgtgtttttaaaagctagagtgggtattgagaaggggaagaggatcatagaaaaagttggttaacatgctacttaacacttcaaatctttactcgatgtcatcatcagcaacattttaaatttatgcttctactagtttgcagttcttttcctttgattattcttatgatacaagcctttccacacaaaatttatgtacaggaattgtgtagaatttttctttggaaaatatggtgatttattacaatttgggcaacatcatcattttaaaaattcagaatttgatttttctcagaatcatcagaaagaataaagcatatatatggttcatgtcaggagaattagaacatgagaattaatatatctctgatcttttaaaatattttcatgtttgtgaatcagcagatttttcctagtttgagatttaaaaaatctagatataattaaaatctcactgatgtttcaccatcagatgattttatatttgtattttcttccacttcataacttgtatagagaagaatagaagaaagaaaaagggaggattgataatctttctctctcagttcttatagcacttcattttttaaacttattacttccttctgcctgctttgtttgtctacatgtttgtatttcatgatttcttagaaatccatctactgccattctgaaggtcatttacctgaaaatgatagaaagcagcatatattcaaacaactgcagagtaattgtctatatcagttatcattgttcattacttttctgttttaggattgaggggctgcctcgccacctccctcacacccccagcatattatcacaaagcctactgattcattcacatccctgggctgaatttgccacccactgtgtgttcctgttgttttgtgtatggaagtgaaaagatttaatttgatgttgttgaaaagacacagaggctaactttcaattttcatatgtagttcttccctctccctctgcaccacctcctttacttgttgagaaaattgccctctccatggtaacaatagaagaagctttcagattttagtagtagttgttgcagagaaaagaattcaaaaagtagatgaagtttaaaaatgaaaaagagagaggaagacagctgggaagaaggcttaatgtttatgagtgggtgtggaggggaagaactaagttgaatgaacaaagctgagctaaggggaagatggtttttctgcatcccagaaggcaataccctagcctttcctgcagccttcactccccaaaagataagagctttatctgaaattcttataggattcattcctgaagagcagcttgtcaccaaacagaaacactgtgatttcctcagggagtcacagtttattattatttttttaatgtaacgcttttgtgaactccagtttccacctcaattcaaatggtcttttggttacagggtgaaagagacccaacaatacacctttcccacttccggaggcctttggttaaaccatgtctgccacaaggacacaggagcctggtatgactggttgttttttgtttgcttttttgcctcctgtgctttctagattgtgagatactgtaactcttgtcgatgacacatagtaccgaacccacccgaagaagtatgtcagtatgtcacattgtgacaaacagcttctcatgctaagtaaatgcagaaccattgtgaaaggtttaataatgcccactcctcccccgccaaagatgtccatatcctaatcccaggaacctgtgaatatgttaccttacatggcaaaaggctttgtattaacagatgtggttaagttaaaaatcttgacacggagagatagcctgggttaccccagtgcgcccaatgtaatcacaagagtcctcctaagagagaaggaggtgatgatacaagcagagtaaaagagagattggaagatgctacactactggcattgaagatgaaggacagggccaagagccaagaaatgcaggcaggctctaaaagctggaaaaggcatggaaaagaatcctcccctacatcccttagagggaatgcaagctctgccaacacattgtttctagcttgtgagacccattttttggactttggacctccaaaattgtaagataataaatttgggttgttttaagccattaagtctgtaatcatttgttacaacagccacaggcagctaatacagccatgaacatttagtaatgactaactttgcacaattttaatacaagcttcttattaaggtttattttttcttaattacaaggaataaaagtggggtctgggggcaatgtcatggtccactccgttttagccatatgaatttgtatttccagcattagaacaaaaggtgacaaatctgaatgtatttgtgtgaaataataataaagcagaacaaaaagggaaaagtgtccagctggaaatgaagttagagaaagatgaggagaagcaagccaattgtgtagttttcccttctgctttttaaaatcatgatttgtttaacccactgaattctattttagaaacaggactgcaaggaagtgttgatggatttggtggcatgagaaccagagtcacagaggcaggaaagtaaggaataagtgttagaataggaagcagagttgcttgggaagagaccttatgacatgtggacagggctagacttaggagtcagaaagacctgagttcaaatgctatcctttagtatagtttgaagtcaggtagcgtgatgcctccagctttgttcttttggcttaggattgacttggcgatgcgggctcttttttggttccatatgaactttaaagtagttttttccaattctgtgaagaaagtcattggtagcttgatggggatggcattgaatctgtaaattaccttgggcagtatggccatttacacgatattgattcttcctacccatgagcacggaatgttcttccatttgtttgtgtcctcttttatttccttgagcagtggtttgtagttctccttgaagaggtccttcacatcgcttgtaagttggattcctaggtattttattctctttgaagcaattgtgaatgggagttcactcatgatttggctctctgtttgtctgtcgttggtgtataagaatgcttgtgatttttgtacattgattttgtatcctgagactttgctgaagttgcttatcagcttaaggagattttgggctgagacaatggggttttctagatatacaatcatgtcgtctgcaaacagggacaatttgacttcctcttctcctaattgaataccctttatttccttctcctgcctgattgccctggccagaacttccaacactatgttgaataggagtggtgagagagggcatccctgtcttgtgccagttttcaaagggaatgcttctatagtacaaggctacagtaaccaaaacagcatggtactggtaccaaaacagacatatagatcaatggaacagaacagagccctcagaagtaacgccgcatatctaccactatctgatctttgacaaacctgagaaaaacaagcaatggggaaaggattccctatttaataaatggtgctgggaaaactggctagccatatgtagaaagctgaaactggatcccttccttacaccttatacaaaaatcaattcaagatggattaaagacttaaacgttagacctaaaaccataaaaaccctagaagaaaacctaggcattaccattcaggacataggcatgggcaaggacttcatgtctaaaacaccaaaagcaagggcaacaaaagccaaaattgacaaatgggatctaactaaactaaagagcttctgcacagcaaaagaaactaccatcagagtgaacaggcaacctacaacatgggagaaaattttcgcaacctgcttatctgacaaagagctaatatccagaatctacaatgaactccaacaaatttacaagaaaaaaacaaacaaccccatccaaaagtgggcgaaggacatgaacagacacttctcaaaagaagacatttatgcagccaaaagacacatgaaaaaatgctcaccatcactggccatcagagaaatgcaaatcaaaaccacaatgagataccatctcacaccagttagaatggcaatcattaaaaagtcaggaaacaacaggtgctggagaggatgtggagaaataggaacactcttacactgttggtgggactgtaaactagttcaaccattgtggaagtcagtgtggcgattcctcagggatctagaactagaaataccatttgacccagccatcccattactgggtatatacccaaaggactataaatcatgctgctataaagacacatgcacatgtatgtttattgaggcactatttacaatagcaaagacttggaaccaacccaaatgtccaacaatgatagactggattaagaaaatgtggcacatatacaccatggaatactatgcagccataaaaaaggatgagttcatgtcctttgtagggacatggatgaaattggaaatcatcattctcagtaaactattgcaagaacaaaaaaccaaacaccgcatattctcattcataggtgggaattgaacaatgagaacacatggacacaggaaggggaacatcacactctggggactgttgtggggtggggggaggggggagggatggcattgggagatatacctaatgctagatgacgggttagtgggtgcagcgtgccagcatggcacatgtatacatatgtaactaacctgcacattgtgcacatgtaccctaaaacttaaagtataataataataataataataaaatctcaaaataattaaaaaaagaaacaaacaaatgctatcctgatcctaactggctggctgtctttggggaagttggtaatcttttctgtgcttatttcctcatgtgtaaaaaaatgaatatagtacccagctaggtagagttgttgttgggattaaatgatgactataaagcatctagcccagcttcggctacattatagctgcttacgaaattgtagttacgatgtaaaagagaaaaacactggaaaaggaggatatgggccattttattccaccttcaccaccttttagcttggtgaccttgggcaaattatgcttcattccgtgcttcattttccttgtctataaaagggtgtaagtacagaaccattgaggggtggtcattattaacctacctcaaatggtgtctgtaagttaatatatattgtgcttttcctatgtacaatatctagcacataattacaaatcaaatccatcccatgtgcaatatctagcacataggaaaagcacaataactagttattactcttgttgtagtaattgctacgctgtaggagtttgaattgtaaggcagtggagagtcactgacctttacgagaaagtgtagcagaacatttgagtagatagtaatggggaatattacataaatggatagatattaggggcagatattactattaaaatattacagcatggatatttattaaggccaaactggttaattagttgcatctctcaggttcctaatgttgcttaattttttaacctcccattttgtgctgccctttgtacgaatatttaatgctcccaacacctcttcagtagcacatgtactgtgagtttgttttgttattacttgtgtgtattagcattcctttgtgaaccaaaagcatggaattagctgttgcctctaggctacctagttttgtagtttggattgaagccttcacctcagtaacacctattctgtctactatcttacagaaaacttgtaaaattaagacagatcattaatatagcagaaagagacaaagggcagagaacattgagatactggatattggaaccacccaatagtgttgatttatttatgattatcagtttttgtctctgcctagcctcatgccactaaagtctctgaggcaacaaagaataagcaattttgctcaccttatacaaataaaacacagaaaaaggaatcactagagaaatggtactgcagcctttctgcagggattactgcttatttttaaattacttaaaaggtattgaaattattgttcataatgagaaacctgcctaataaaacagaaaattaaacttaacacttccctataatgtaaacagctcggttaggaacacaacattacagaaaccacttaagaattgattgtacttgttcttggagcagaactagaagctcaccgtttagaagctgtgcacatttccctatcaaacagtacataaagtttccatattcctcagaatcggcttcatttgtgccatgtgtttgcttggaactatgccacagaaagcagttctccccctcaagctgggctcctttcatgccgcagtgcaagtgtgtgatatactggcaccatgtgctaatgtagacccatttttatatgataagaattagtacggcctagggaatagacaagtatgtctaaaatcctccccatagaatatgtcccttcctttaaaagctgtcatactgtaagttccagctgagttaaaggccactgtgctcctatagggaaatatattctattgtaatttttacgttctccaataacagtctgttctttgtttactgaagagagctttcatgtcataaaatggtgttttttgacagagaagcagaatcattgttttattatagaaatttgctcttacaacagcaaaaataaatagctcatctcttaagctcctgatcaatgtctaacacctcctacccccagcaacacttcactgcaagtatattaacactctataatagcaattccactcacctaccaagaaatgatcttcacaaatgatttacagctaaaccagagcttaaacacatagcacccaatcaagggcagatttttatctttttcccagtcatataagttctgagaagaaatagattaatgttgatctcccagacaactgctgagaaaatgtacaaaggatgttgtttattttgaagaatgagacctagttgttaagcactttttccccttatatgtacgtccaaaggtaaccattacaccattttgatgcaaatttaggatatatatttattcatacctctcttctccattcggatgttgtctgtgtgagtgctcacagacacatgcacacatacacacatgcactcctgtttcacacttatttgtaaaactcacaaggatttccaagccattaatatagcattgtttaaggtgaacacatggttgttcaccatccatatgtatcttcactttgtagcactcagaatttggcaaaatcagaaggctgaaacctcatggattaaatatattctatataacatatgtcttaattgctgttactgtaaagaaacctggactagccatatttgactaatttctacctaaggtatttgaattcttataaatagattcattgctttaatcacacaagagtggtttatatgaatgtaattatctccactttatagctgaataaactgagcctgattctatccctatatgggaaacatgaattgaacagctgtgccaattattttgataattcaaatttcacatctaccatgtgaagacagcagaagagggttagggggcttgaattattctgattaactgtgttcatgagtgtaatcgcctctagataatcactcatttcttcacttcacttcccatctacaggtagtatcagcgaatggtaacatctcttgctttgcctcagtttattgatggctgccgttagaaataaaaagcatggttttgtttcagtacttaaatgaataatatcttcaaaatgtttttaaaacgtgaaaaggttgaatgcatttttaacaaatgttttgttagctttgacttttatttttgaacagatgagcacaataccccagtactcctttcctagaaataggagtactacctgaagacttatttcccaaagaaaaatatcaggtctagtgcagcaatacgtattaagggcattgaaaagttatattcacaaaatgtgacatcataacatatgttaatacttcttatcactgataataatccttgaagttgtatttccagagagatctcaatttcttctcacactctgaaagtctctgtttatcctttagagtaggaatgtaagaatttaacaaaacattctgaatgtttaccttttttctaaactgaaactacaatccctttttacccctatatagtaaaatataatattacaagtagaatcagcaaatttgtttaataattctttgggacagtttttacaagcaatggggttgaatttatgttccttgtgtgcagtggagttattatattcttcttaaaaagatgcatgaaggtaaattagaaatgttttacatgttttcatgacaggacatttaatcaaagaggagatacaagaggcttttcttgggttactgcaatttaattttccatttctttcttggaagggacattggatgcagttgtacgaggttaatatttctaacatgccacttttattgtggcattcttctgctctcaaacctctgatgatttcccatggccttcaacatgatgtccttatttgggcatctagtgttctgagccctcacattctggccccagcttcccttctcaacttgatcacagccatcgtaattctgctaactaattacacagctgcccttcccactctttctcaaccactctgctgtattctgacttctacactttagttttaaagctactccttgtcctgaaattccttctcccattaggtcattattaattgagttcatcctctaagttacagttcatgttgctgttcctctatggcaccttccctgaacctggtcccatataaaatcccatctctcagaatcccattagggtaggatatgtggtctgtagactattacgtttgtcatttacatattgtcttctattattgggtaactgcgtgtgcgagcatgcatgggctggcctgaaggtcacctccccaactgcattgaaagttcatcacaagttcaattatttcactagagagtctctttcatgtcatccatgaggcacattccctactgtgatgtgttatgcatacaattatttcaataaatattttctagctctttgattgaccaaagcttaattacctgtcaactctagcctcttgtatctggaatttctacagtctttggatagtatctttaggatgcaaaattaggaggagtatgtaccaggcaaactattacaaataatgccctcaaatagttacatttcactattcatgtcttgtaatttatcttctgctttggtattttagtacacttatgattcaatttgctgtatagattcctctgaatagggacaagagaattcgtcttgataagtggaagttcgaaggattccaaaatgatgttattcaaggtagaacaagaaattaatactgaaaaaattgaggagtaataatccccaaatatgtacatgcgtatctcgttttattgggtttcactttattgcactttgcagatatttcactttttgtaaattgaaagtttgtggcaaggctgcattgagcaagtccgtcgggcacaatttttccaacagcatgtgctcgctttacgtctctgtgtcacgttttggtaatttgctcaatatttcaaacattattattattattatatttgttatgatctgtgatcagtgacctttgatgttactattgtaattgttttgagatgtcatgaactgcactcatatgagatggcaaactttgtggggtgcagtggctcacacctgtaatcctaacactttgggaggccaaggcaggaggatcgtgttagcccagaagtttgagaccagtctgggaaacaaagtgagaccctgtctttaaaatatatatgtagaaaaattaactgggcatggtggcacatggctgtaaggagccctgccagctgcatgggaggctgacacaggaggatcacttgagcccaggaggtcaaggcggcagtaagccatgttcactccagtgccctccagccagaatgacagagcaagaccctgtgtggaaaaaaaaaaaaagacaaacattttttcaactttgattttagattcagggagtacatgtgtaggtttattaccttgatatattacatgatgccgaggtttggagtacaaatgatactgtcacccaggtactgagcatagtaaccgatagttagtttttcaacccttgtttccctccctccccactctagtagtcctccgtttctattgttgccatcattatgtccatgacaacgcactgtttagctccacatgagaacacgtggtatttggtattgtgtttctgcattaattcacttagaataatggcctccagctgcatccatgttgctgcaaaggacatgattttgttcttttttatggctgcatagtattccatggtgtatatgcaccgtattttctttctccagtctgccactgatgggcacctaggctgacttcatacctttgctattgtgaatagtgctgaaatgaggatgagaatacatgtggttttttagtaaagcaatttgttttatttgggctatatgcccagtaatgggatcactaggttgaacgatagttgtgttttaagtcctttgagaaatcttcaaactgtttcactgtggctgaactaatttgcattcccagcaacagtgtatcagagttccctcttctctacagcgtcagcagcatctgtcatttttttgactttttaataatagccagtatgaatggtgtgagacggtatctcgttgtggttttgatttgcatttctctgatgttgagtgatgtggagcattttttcatgtttgttggccacttgtatgtcttcttttgagtagtgtctgtttatgtcttttgcccattttttttgatggggttatttgtttttgacttgttgaattgtttaagttccctatagattctgaatattagacctttgtcagatgcatagtttgcaaatatattctcttattctgtagactgtctgtttactctgttgataaattctttcactgtgaagagctctttagtttaattaagttccacttgtcaatttttggttttgttataattgcttttgaggacttagttataaattctttcccaagtctgatgtccagagtggtgtttcctaggctttcttataggattcttataatttgagatctaatgtttaaacctttattccatcttgagttaatttttgtatatggtgtaaggagggggtccagttgcattcttctgcatatggctaaccagccatcccagcatcatgtcttaaatacagagtccttttcccattacttattttcataagatggcaaacttaatcaatcaatgttttgtgtgttctggctactccactgatcagccattccctcatctctcttcctctccttgggcctccctattccctgagacacaacaatattgaaattatgccagtcagtaaccctacaatgtcctctaagtgttcatgggaaaaaaaagagtcacatgtttgtcactttaaatcaaaagtcagaaatgattaagattggtgaggaaggcatgtcaaaagccaagacaggctgaaagccagacctcttgtgccagttggccaagttgtgaatgcaaaggaaacgttcttgaagaaaattaaaagtgctactctgttgaacacaggaataagaaagtggaacggccttatttttaatatggagaatgtcttagtggtctggatagaggatcaaaacagccacaccattatcttaagcaaaaggctaatctaaagcaaaggactaattctctgcaattctgtgaatgccgagagaggtgaggaagctgcagcagaaaagttggaagctagcagaagtatgttcatgagccttaatgaataagccctctctataacataaaagtgcaaggcagagcaacaagtgctgatggagaagctgcagcaaactatccagaagatcaaactaacatctaagttaataaaggtggcaatactaaacaacacattttcaatatagacgaaacagccttctattggaaaaggatgccatctaggactttcatagctagagagaagtcaatgcctggcttcaaaagttcaaaggacaggctgactgtcttgtgaggggctaatgcaactggtgactttcagttgaagccagtgctcgtttaccattccaaaaatcctagggcccttcaggttatgctagatctagtctgcctatgctctgtaaatcaaacaacaaagactagatgactgcacatctctttacagcatggtttgatgaacattttgagccctctgttgagacctacttctcaaaaaaatgtgtctttcaaaatattactgctctttgacaatgtccctggtcacccaagagccctgaggaatatgtccaaagagaatgattttattttcatacctgctaacacaacatccattctgcagtccttggatcaagaagtcacttcaactttcaagtcttattacttaaatcatacatttcataaaggtatagctgctatattgtggtgagtccactgatggatctggataaagtaaactgaaaacggaaagtcctcaccattccagatgccatgaagaaaattcatgattgaggggaggaggtcaaaatatcaacattatcaggagtttggaagtagttaattccaacactcatcaatgactttgagggtccaagacttcagtagaagaagtcactgcagatgtggtagaaatagcatgagaaccagaatgagaagtggagtcagaaggtgtgactgaatagctgtaatctcaaggtaaaacttcagcggatccagagttgctgcttatggatgagcaaagattgtggtttcatgagatgcactctactcttggtgatgatgctgtgaacattgttgaaatgacaacaaaggatttagaatattccataaacttagttgataaattagcatcagggtttgagaagattgactcaaattttgaaagaagttctactgagtaaaatgctatcaaacagcatcacatgctacaaagaaatcattggctataaaggagagccaatcgatgcagcaaacttcgttgttgtcttattttaagaaattgctacagccatcccgaccttcagcaaccgccaccctgatcaatcagcagccatcctcactgaggcaagagcctgtaccagcaaaaagattatgactccctgcaggctcagatgattgttaccattttttttaggagtaatgtattttcaaattaaggtatgtacattttttagatacaatgctattgcacacttgacagatgatagtagagtgtaaacataacatttaatgcactggggaaccaaaaatattcgtgtgcctcattttattgtgatatttactttattgcagcagtctggaaccaaacacacaatattccaaggcagtcctatatattgtttcatgtctctctttcttctaaaatgtgtgtaggagaaaaaattatatcacttatgttactgggccataatatcaaaagcctgcgaatctgatgcacatgataaaaactggtcttaaacctgtcttgattatcctttgttaatatgccaaatttatagaacaatagagtttcaagaaatgtgaacaatgtagaataactaaaagatctaacgttgaatagctaaaattatcaacgccctttatatcactttagaaatgcgtttgcaaatcattatcaacaaattgtagcataaaattctttttttttcttgactttgaaattgtatttcaagatccgcaatttacaccacattatttacttactggcttgtgaaagtgaaaggcattttcatttttggatgttaagggttttagtaaatgacaagtaaatcaatcctttaagttccgtgtggtataatagcttggaaaggaccatcttaatctttttttcaacacagggagataatttattttaaaaataacacactaatagtagattaatattattaccatttcaaagaagtcaccaaatttggtaggcttaagaggttttttttttttttttgagattactatgctctttttttattttatttattttatatttatttatttattttttagttttttaattttactttaagttctgggatacatgtgcagaacgtgcaggtttgttacctaggtatacatgtatcatggtggtttgctatactcatcaacccaacatccaggttttaagcccccaatgcattaggtatttgtcctaatgctctctgtccccttgcccctcaccccttgacaggccccggtgtgtgatgttcccctccctgtgtccatgtgttctcattgttcaattcccacttacgagtgagaacatgcagtgctaggcttaagagtttttttaactccccaaaatatcaacaaattgaaacattactacaaagaaatagagaaataaatttcactgactgtcttattgttttttaagtttgaatagctaataatgatttcttaaacagctatcatattttttatttttaaagctagccaaatgatcagtgatttttataatactgataaatactgcttagaaaaggaacatgtgttctagcaatttccacacatttctgattctaattacttgtttctttttgttttatttttatatttttaagttttgtgagtacctagcaggtgtatatatttatttggtacttgagatgttttgatacaggcatgcaatgtgtagtaagcacatcatgtaaaatggggtattcaacccctcaagcatttattctttatgttccaaacaatccaattatactcttttaattaatgtaaaatgtacaattaaatcattattggttatagtccccctgttgtgctatcaaatagtaggtcttactcattctttctaactaattttttgtacccagtaactatacctacaccacccccacctccccacgacccttcccatcctcaggtaaccatccttctactctctatgtccatgagttcaattgttttgaattttaaatcccacaaataagtgagaacatgcaatgtttgtctttctgtgtctgatttatttcacctagcatactgacctccatttccaacaatgttgttgcagatgacagaatctcattcttttttgtggctgagtagtattccattgtgcataggtaccacatgttctttgtccattcatctactgatggacacttaggttgcttccaaatcttggctattgtgaatagcgctgcaataaacatgggagtgcagatatctcttcaatatactgatttattttcttttgggtatatacccagcagcgggaatgctatattatatggtagctctatttttagttttttgaggaacctccaaacggttctccatagtggttgtgctaatttacatttccaccaacagtatacaagggttcctttttcttcacatacttgtcaacattggttattgcctgtcttttggatataagccattttaacgggagtgaggtaatatgtcattgtaattttgattttcatttctctggttatcaatgattcagtgatgttgagcaccttttcatatgcttgtttgccatttgtatgtattcttgatctgccacaagtctctaattacttgtttcttgtaccactgtttcccttcattgtagtcagtgatttggtcaatcaacactttttacgtatgggtatctgttaactgtatttctaggaatggaccaagaattgagaaatttatcccaaccagaaagaacaaaatctatggaggcacaggattactgaaagctttgctcctatagcctcagtttttttctgcaagttcgctgcttcccagttgtccttgtgataaaattcaaaacctcaaactgatttttaaaaagccaactatatactgcttctactatgtctacctaaacttatttgccattatttgtaaagaattccaggctctaaccagcccatttgaggctttattttacgttcatgcctttgttcatgtctgtctttcccttataatgctcttctcattctctagccaaatctgccaaagttcagctgtagtgccatacttgatatgaagtctttgctgagaattcccatatgtggtcatttccttcactgatttgtttcaatagttgttgccattattattattttttttatactgttgctggatactttcgcagatccaatctctaacctgttgttctaccctaggaggttgaccaatatggcagtagcattgggcttgcttgtctattggcttggtccttgtgttgggaggcatcagcagatcaatggatgagaggagagtgagtcgagggatggctaggttcctttactcacagccccagctcctgtcaagaggtcttgtccctgcagccacttctcagattctactaactataccctccccttagcctttcaggccttgaggaggaaagcctcctcatcccactttgaatgaactatttattgcaagaaccatgactgattcagaatataatctgtccttgaatgaaatagttaatttccccttttgtattctcgtttcatatccctgtccctttatccattcctatattatatcatactatcatatagctaccttatattatactatgacatgagtaccttgtaagtatatcatgctatattatagttcttaagtgtgtgggctttggggccaacttacctatgttagaagttctgccacttattaccatgtgatcctagacaaattgtttaacttctttttcattcattttctttactagtaaaataggggcaatattagtacccacctcacagagtaatatgataattacattgactgatagtttttatttaaaacttttattgttcttactatgaaatgggaaatgttctaaacaccttacaaatattaactctattaattctcataatgaatctgagaggtagagactcagtatctccatttcacagtgctggaaatgatacagacagcatttaagtaacatactgaaaatagtaaaccgaataggtggcagccagtatgcaaattgggaaagcctgactccagagttcattcttttaactagtatgctgtgatagactcttttggcatatggtatgcactcaataaacaactattgttgttgtcgttagcattacttcccattgtattattacacaaaaaataattgtttatgagtatttgtttgctagattataagttccttgaaaaaagaagacaagttttatttgtctatgtgtactagctgagtgcttggcaaatagttgcagtttagtaaatgtttctaaaacaaattattagttgtttcttatgtatttcccaagtctatcctagccttggaaacagctaacacttagctaaacctagaaatgtcatttgagatttcagcagccatcattgttgctgaagccacaggttctcctttttatctccaatttcttcctcagatgattcaccactttctttgtcgtttccctacttcatttttcctatagtgacttttgttctccaataaccattgatagtgatgacagtcccaccttggaaccacttctaactgtcctgttcagcttttcctgaggccagatttcccccaaaatacattttttagcttcataactgctccttccagaaatttgaaacgcattctcaggaattaagcaagaggcatttgattgacgtcatttaatttgtgtttaaatgtgttcttcccatcaacgattaaccagtgcttcagccaagatacataacttttattctccactaaccttagggttgaggtcacaatcaggtacgtaatctgtagagcccagtgaaaaatgaaaacgcagggcccttggttaaaaaaaaattaagaatttcaagatggcaacagtagagcatgaaaccaagtatgaatcccttctaatgcagatccttgtgtaactaactgcacaagttatacgttcaagaagctggtcctggttgaggtctttgtctacctagggcacttctcactcagagaggtggaataatcttaactttctgtcttccgtcatctgaaaacttgccccaaagttccttttgccatctcttgcagcaaacctagtggttgttatctgttaaggattcctggtggcttgctttagtttcctacagttcttgagctgcatgtgttgaatggaactccaccattaccatgtaacacatctgaatactcttattttcctccagttaaattctgcgctccttggaaataatggtcatgcaccctaccttagtgatttctaaatagaggtagtatgtaaaaatacatatttacttgaattgcatcttaagaggccagcccatgggaggcatgaagaaacctatgttactaattaatattcaataattgacagttacacattcaggtagtagtgtcatggaaccatcacgttacatggaactgaagagctgatgagaggtttagggtctaggaggacaaaagtgagtgtattagtcagggcctgaggttatatgtacccagacaggataaaatgggacaatattttattagtggaaatatctatgtgaaagaaaagaaggaggaagccaaggaaggtgcaagagatgttagatcaagatgcaattctgactctgcaaggaagagagagggagagaaggctaggcagaagcatcccagtgtgcggtctagtggaaggaaattttggcaaagctgttgggaagtcattgaggcagagccaggcaaagaagtcccatgtctcccaaggaaggctctctgccttagtattcccaccacacccaatcattgggtgaggagaagtctgtgagaagcttggctttggtgcagtgcaatcatggatttcaaaatgcagtaacaggagtcctcagtcagttaagacccaataatagaaggcctgcatattctcatggtggccacttgggtatgaggagcagtggtgtttaaaactgttttgtataatttaaataaagaaaagctgaggactacttaagcttgattccttcagaagacagtctttggcctttatatttcatgtgatatctttgccatatgctctgataactctccatgtttcccctaccataatacctcaggttgttgcaattgcttttttattgcctgtcatcactactcgtttgttttctctttgagaacaggaattattttctccttcactgctacagcccctgcacctagctcaatgagtgacacaacagaagcacttaaaaaattgctataactcaaatttgggggatattctacaaaatacctggcctctgttggtcaaaactgtaagtgttataaagttcaaagaaaggcaaataactatttcaacttaaaaaagactaaggagatacgacaactaaaagcaatgcgtgagtctggaccagaccaggaaataaaaatatagctataaagttcattaatggggtaattgtcatactctgaatatagagtatggataagattatggtactaaagccacgctaaatttcctgactttgaaactgagctgaggttatttaagagaatgtctttgctattaagaaataaaacctaaagtatttaagggtaaaggggcatgatatctgcaaattattctcaaatgattcagaaaaaaaatatatatatataaaacattacatatacagttatatatctatacacacagagagaatgataaaatgataaataattaaaaataatgtggcaaaatgttaacaaatggtgaatccgggcaagggttacctgggagttctttatcttgcaaatattctgcaagcttgaaattatataaaaataaaatgcatcttataaagtatttattcagtgaataaagaacaaaaaaggctaactgcagttggaagatatttatgaagttggttatgaagattcttaagaagttaccgatggaggtgctagtagaacattcaaaaaagaagtagggaaggttgaccaagtaggaaaatatcaatatccaagccagtataaaatggaaatgagaagtgaggaagtaagtggaagacaatgaggatggttttcgatttggccactctatttggagaggcagccgaatgcaagaatagaagccagaagaagatgctcagtgagatggttgaaagctagatagattacagcatcctcaccagtaaaaccctttcggtaactagaaaggctacaatttagtaccttcctgacttctatgcttattttcttcaatacataaaatggttccgtaaactcttttaccttctgaattctttatattaattttttgaagttgtaaataaaatagcatcagttctacattgttacatttcagcttaattcatattcatttactgaaaatgggaacatttgaaaaatcatcatgggcatttatgctatgtagattgttgatttttatagaaaaatataaaaatatgaccagtttgattttcaaagtcttttcttagacatgtaaatactaagcattcaactcaacatatagagtttttatttgagtattatttaggtggaattctattttaatgaatacaataaaaaattgtaattttgtctaaaagcctaaaatgccctagttataatatgtatgatttcactgtttaacttcctatttcatagggttgctatttataaccacttcactcaactctggggggacttagtgagattaaagacttctgattcactttgtatttgaagaattttttttcctccatctttgctcagctagtggaatccatgatgaattctcatctccaaggggtaagcagtttttagtaaagcccagtagctgacttatgactccttagaaatagcattgattccttccttctcctgtgttttgtttcctctagaatgatagaatccatgtagacacgatccattatcatgcttaggtactggtaagcatgtaatgattttagttttgttcgctttaagttatttgtgtcacaaatatctgggatcatatcagagaaataaataagcacaattagcattctacttgtttgttatgactaaagctaggttgaggaaacagaaaaggaccagaggtcatatgaggatgaagataatactaggaacagcatgtttgggagagtaacatctggtaggggtagcagattgggggcagagaacagaattttatagatggatattttggaggcaagtagtttgagtaatgattagatctaaggtgttttctcatctgtgggtggctcgaaggaatagaggtgaaggtcagtttatttgagaagttctggaattataaaactaagttgaagtcaaagaaagtatagtagcaaataaatagaatacccttaaaaggaaaccaaatgaaaaataatcgttactctcaccatatgcttgtgttcttattagcaagaaattcttttaaccactgtttttataatatcttaatgaaaaaatactgaagcgtatgccatattaaatccctctctttatttctagaaagggaatcaaaggagaaaattcccattctgctatactaaaagaccactaagtaaagagcctattagtgtatgataaatcccatagcaatatacattatcattttacagcttctttgttgaaatgaatgtttgtatgtgttgaccatagagtgggataaaaagttgaaattttgttttgaaatattttagaaatgcatagttgtactgcagttgtgaacctccttagatttttaaggaggctgcttcaaaggatctcattaataatcttctcaggtgcttacaaagcatgtgtctgtcagcagaattagagaatcacccaactagagaacaggtttcacaataccctgagacctattttgttcattagagaggaaaatggcttgttttgagtctaagttgacatgcttgctaatttcagcaataaaagctgttcattgtggtcaggtttaatttagagcctggtaaggttcagattaaagttgatcaacttacttttacaacatacttcttaaatgaactttgaaatcttaaaagaaggaaaaaagtatagcaaacagtgaataatgtatctaaaactgagaagcaaaaaaaatctggttatgtgagagtgaattaaaagaagaacaacccaataaagataatctttgttatataaaaatttccaagtatcgaaaagcacgatttttcatgtgagttacacactataccgaatatatttgtccactgccacatgcatagtccctagaatagtgcctagtgctgaaaaatatttattaaaatgaatggatgagtaaatgaatttatgtattttgccagccctgtgtatttaaagttctctgttaactttgaggtgaaaatttgacttcatctgaggtttctgggtaagtccgttttaaaaattctattgaacatattcaaacattttagggtaggcaattccaaagcaacctttcagcttcccatgtcacagatgaccagagtttcacattctaacactggaaaacatcttatttcataaaatctacctgctactatatggttcctactttaaaatttgttcagtactctccagctgacttatgccacttacttcaatagctgtctttggcaatttgttccatatttcaaacactctgttgtgtaaagaaaccataaaagttagaaacctgaaaattggattttttttctgagcaatcacagcttacaaatgtggaaaatttgttaaaagttagcccctccaatttttcaatacagagaggagaaagtgcctaaagtagatgtacaatgtttggaaaagttttttgcattattttactattaccaaaagcaattgagtttaaatcacaaagcctgtctccctacctcttcacagaagaaacactacagaatgatcaaaatttggcctttccaaaaccaaaattcgttagaaaatcagcaggagtcaaagtacagagtaaataactaagtttcatataagtttcagatacattactatctaccactttcatctcttcatcttcattggcctcatgtggtagaacatcatatttaaaattatacaaacttgctggcttgtttactagtgtggttattataagaaaaaaatgagaaaatatagataaaacatctgtcacatattgcttataaactaacagtaaatattacttgtattttccccaattaaaataaaatttactgagttttagaaccagagctagtcagatgcctttttttcataaatttcttcataaatacctctgagattgtggtccttaaatctagagagactaagatgacagagaaaatagacactgaagaaagggaagaatatcttaatgatttacattactacctataaattaaaaattgttaactttattatatttgtatttttatttaaaatagtgctatattaaagtcatttataatacaggggaataggaatactaacctgtaatctgatgctctccaaacttgcctaaatcataaaagttaattagataatttatttaaaatgcaagatttgcagccctttccactacatattcattagttctggagggaggcaaaaaggtttggtgattcttacggacaggcagcttaggagaaaagctgatttagctcgtctacttcaccttttcatttgacaggtgagaaatctcaggggtacaatgaagttaaataagtaatatctcttaaatcggttctgtgctttttctgtttttaaaataaatataccttaattttgacgtcacacagaatgatattataagtataaatagttatctatcttttaaatacattgtcgtaattcagaataacatttcttactcaaggcattcagacagtggtttaagtaatccgaggtactccggaatgtctccatttgagcctttaaatgaagaaaatctatagtcaagattttcatttgaaatatttttgatatctaagaatgaaacatatttcctgttaaattgttttctataaacccttatacagtaacatcttttttatttctaaaagtgttttggctggtctcacaattgtactttactttgtattatgtaaaaggaatacacaacgctgaagaaccctgatactaagggatatttgttcttacaggcaacaatgcaggatttggaacagaggcgtccccagttggaagaactcattaccgctgcccaaaatttgaaaaacaagaccagcaatcaagaggctagaacaatcattacggatcgaagtaagttttttaacaagcatgggacacacaaagcaagatgcatgacaagtttcaataaaaacttaagttcatatatccccctcacatttataaaaataatgtgaaataattgtaaatgataacaattgtgctgagattttcagtccataatgttaccttttaataaatgaatgtaattccattgaatagaagaaatacatttttaaatcaattcagggcttatatagttgcaaagcatgcattgatgggtgtggtgaccacagtgtggcagaacatttgtggcagaacatttgttctttagttgtcatctgggctggcatccatggagatgccagtctctccctcatatccttggctgttggtccaagcaggcagtggcttcttcctgggccatctttcattcccatgtgcagtgactttcagatctggatatctctccgctactttgatgcccccattttgtaatatcaaaaatcatcgtactgtaccttatgccgtagtagggtgggcaggaactttggtaagacccatctgactagacgctgtgcatattcttttcttctgacatacactcctatccatttaatggggagagtgattcgcagtgattgtgtgttgtgtcagtgagtttccatggggtcaggaagagtgacagacgaaggagtaggggaaactcgccacccggtttccctcagagattctcctcagaaatgaggtccaagtcagctctgctttcaggttctctcagatctctctcggtttcttcacttctctctaccttccttccctccagggacacacactggtattgaattttcttgcttcctctgcaatatcccctcattttccttcccacaacccgaagaatcctttgtagtgcaggaaggaggaaaacctttcagccatctttttttttctctttgaaatcttttgtcttttaccaggcttagacttttcaaactcggaaaccatgagagtctatatcttcataatttatattctgctatgttaacccttccctaaggaaatgactagttgtcaatatgttggggaaagtgaaagagtaaccagagtaaaaggttaatattttaaaatattattagtcatacttccacatattgggtaagtacttattgataatagctagtatttattcagtacctcataagcattagatggtgtgtgcacatgtgtgtgtttctgtgtgtttctgtgtgtgtgtacaaaatctttacagaatcttgtgagctatattttataatccccattttatagacgagaaaacaggttccaagaacagttactcggccgggcgcggtggctcacgcctgtaatcccagcacttggggaggccgaggcgggcggatcacgaggtcaggagatcgagaccatcctggctaacacggtgaaaccccgtctctactaaaaatacaaaaaaaaattagccgggcgtggtggcgggcgcctgtagtcccagctacttgggaggctgaggcaggagaatggcgtgaacccgggaggcggagcttgcagtgagccgagattgcgccactgcactccagcctgggcgacagagcgagactgcgtcgtttacaaacaagcaaagaacagagcttggaatttgtaaatgtctctttctgacttgaaaatctgcgctctttctagtatgtttaccatttcccatcttgttttgttgcttttgttaatgaccttaatcattgtactaagactaaatacttcttttgtctgaaattatgtatgttttgattcacttcctaaagacatgtcttctttcagttgtagtgattgctaattaaaataggctgttcttggttttgaaagtttaactctttattgttgcttaaacaatgaatgtggatgtatgctaatgtattatttcagtaacactagccactataacaggtaatctcccaaatcttggaggcttactacagcagaaatttacttcttattttagtgcagtccaaaataagcagccctctatgaagtcattcaggaacccaagctccttccatcttttgtgtccagagcataagactcatatgcatttaatgggcagatgaagaatgagtattactcatgaaaatttgtcatgagccacgcctggaaatggtgtgtgttaattttgttcatattctgttggatggatcttgtcacatggtcacacctaactgcgagggaattagggaaatagtgtacactgttgagcctaggaagaggaacagatttggtaagatagccatacaattgatttagcagagcattcctccaccatactggaaccttgagggttctccaacaagttgcaacacactgacccaaaagagtgaatcttagtgagtgatttactcaatatgagactgaattcccattacacaggtaagtgatcagtttcttgcctgagaaatatggaaatttggcagtgaggtttatgcaaatctgaacatactatacagagagtcatttgttattttactaatgaaaaatcacttcaattttttccctaagaggaagacaatatgaatgtattatacagtatttgttcaacattgtctgaacattttccattatcccctgcatttttttttcatattgcattgactttttcatgatagagattaaaattgaatgaccggagggcaagtttgtatctctctgccaatattcagtgatttgaatagttcttcttttctaagcttttgtcttttaggaatgaatacctttatgaatatttgcagcctagtggaaaggctgtaatccaaatggtccaagaaagcattttcttaaaagcaagtgtctgtcgagatgtgtcatagcgcttattaagagtctaagctggaatcttagttccaaatatgcctggagcctctaaatggtaccaggataattctgacaagatatgtttatctaaacaatgtcatttgcagccctgctacacttcagtttatctctccctttgaaatctataaaatgggatggaaattcaatactcataaacttttcgatcgtgttcaaaatagaatttttcttagtaaagatttggttttcaggaaaaggacagaaataaaatacttgctcataaaattgtattttctcatttgatgattttggtcttcctttttattgccatgaaacttctagaaatgctcaaaaagaaatcagctaaataaagaaaaaatagttaatatatgtatgtaatactatattgaaacatttttctttctctggtaaatcccatttcataactttgaacagttgggaaaatctatacatagttattgcagtctatcaagagaaaagttcagtacaaagctatttatgtctactagaaatattcatgttaaacttcaagtaattgggtgtgcaagccaccaccatgttttactatatgaaactattaccgtggtatctgttgtattcaggtaattatattgatggaaatcatgcagtaataatctaggtaagagagtaaattttgtctaaatcagatcaaatgaaaaattctccctctttctaatattcgaattgctcatttttctttaactctttggtgtctgaatttgtcaatcattcctggccattttcttctgcaaaagggctgggtcaggggaccaaaagcagataagattagaagaatttaaattttcttccttggaggcgtctgaattacatgaaactcttgttcgtgtctgttaatactgcaaggcataataccataataccttgcatagcagtgaagaggatttggaaagataaaactgcttccttttatcattctgtttatttcacaaacaatattggtgaatgtcgttcctgtaacatttggatttaagagccttgtttctgtagcttctccctccgtaacccccaccactaccatttcggggctatacagcaatagcatgcattactttaaaaggcaggctgcctagactggccacttgttagctttgtggccttgagcaaatgactaatctcagtaaactatctgctcttagtttccttctctgtaaaataggctcacttataactatctcatgggttgggaggattagatgaaataattaatgtagagcccttagatcagggccatagtaaaagctgaatgaatgttagcatttgttattttaattataatctattggggtgctttgaaggcttaatgcaaaatacttaatgagctttttggtagctgtttagttatttcgccccccaccaccaccccaaaaggagagatttaaaagaccgacaggagaaggttgcttggaaaagatggaataagatctataaatagaattaaacaaatattcaggaaagccttttgtgggaaatactgcaaaatttttattatctataaatttaataggtagataaaattactactcccattttagagacagaaaaccgagactcggagagctaacgtaacttgtctagggtcttaggaagatgacaagtgaggaagtagaattcaagcccacgtctatatgattttaaagcccgaggcacatcaaatggaaaaggctggttagtcagaaaaataggaaggtatatttatctgacaacttaaaatattaggactaacctcaggtaattatagtctggatatacatttttgctgctcctgtttatacttttgacttctgtgtatttgagtgtctaatcaaaggattgtcttttacatgtgttggagatgtacagactagtggaccccaatgatctattagctgtgtaaccttagccaagttaattctctttcctaaactgtggttctctcatctgtcatgtggggctaataatagtacttatgctggtagggtgattaagaaagtaaaataattggtgtttctaaagtaaatatgtggcacatattagatgctcattaaatggtacatattgttatggtgagatggatttggtacagagagaactggagatgggagaatatgaagggtgtataatgtggccttttattagctaaaccaagggaaggacttctgaaacagaattccaagttttaagagggagtcgtttattttggaattattttttcagctaaggatttttcaacccagtccagaattcttagagaaatttagtgatagcttataaattttaagaaaaggaattcacattatattgcataaagaactggtatacagggccatagaaggggagaatgttcttctgtatgagaataaaaaaaaacatctctcacacgatttttgaattaactgacagttttatagcagctttgtcaacccatcattcattgctgcaaccaaatctatgaaatccttcatggcgaaataaaaaggctctgttgttctccacatttgtatgaaatctctgttgctaatgaaatgccagccagtatcttcctctcaggtattgtctattagatggttgcttattttagaagaagtggagtcaaccatataaatttccttcttttgacatctagcacctgctgtcaacctgttatagctacaagcagctctcaaaattcacatccactaggatgccgctggcaaccaaagagttcagttcagttcagcgaacgtttgaatgcctactctgtgctatctaatatcagagatggtagaggggatacaggaaaaaagtaagattcagcctttgtctttaaagagctcacaatcaaatgtgggtatttggacaagtatatttaggcaaggcagtttaggataggtgcttcagtagagcagtattacaaaatgttgagagaaaactagaggaggagttttaaatgagggcttagtggaatgcttccaggaggaggctgaatttgacctggtcatgaataagactttgaaaagcagaaggaagctggagagggaagggtatttcaggaattgatgacaggagaatacataattagacctgttaacagtggggtggaagacgaatatcagcatgggagtgtgtgtgtgtgtgtgtgtgtgtgtgtgtgtgtgtgtgtgtgtgttgtggaggataagggagtaaatgaagtcagtaagaccagttagaaggcaagagagcccaagctggagcagtgaccatggagtaaaaagaaagaagtgaaattgagacataaggtggagctagaattaacaggattttgacattgattgcatatataaaactgtcaatctaagagaaggcctgcctctaagagttggagattgaattctttggaagattaatgtcataaccagagacaaactcaggataaggagttgattatgggagacaaagtaatgtgcttaacatgaagctagatgaccatactgagattttaaagaaatggttgaaaacatagagattgcaggagtgatgttacttttggacaagaattcaaaagttacctggaatgtctgagcttgcacagagagagggtacctggtgcaaagaaaagtgaacctaggaaaaagcctagaagttggtttacatttaaggaatttgagaagaggtagcaccacccaccccccacacaacccccaaccctgccaacttacaatatagaagcatttagacacacactgaataataattttttttttgagacagagtcctgctccattgcccaggctggagtgcagtggtgccatctttgctcactgcaactccgcctcccagattcaagctattctcttgcctcagcctaccgagtagctggcattacaggctcccaccatcatgcccagctaatttttttgtatttttagtagggacggggtttcgtcatgttggccaggctggtctcaaactcttgacttcaggtgatccacccgcctcggcctcccaaagtgctgggattacagacctgagccaccgcgcccagcctaaataatgaatttatagatgctacactgtatggtttcctttttctgctgctgtacaaccattcaagtaacataagtttcatcctggttcttaatgataccatgaataaagtatagaaactctttagctgaggattaaagattgttgtgtttaggtagaccaggtttctgatgcagccctcagtataccagggaaattagccattactgtttgccttgtaggtctaatgaaccctttagctttttattttgtatatgtctaagttactctacaaattcttatggaagtataaagagatagtgaaagacaatcttatgagaaattttaataagaattgaaatacaggctgggcacagtggctcactcctgtaattccagcactttgggaggctgaagcgatggatcacctgaggtcaggagttcgaaaccagcctggctaacatggtgaagccccatctctactaaaaatacaaaaaaattagccaggcatggtggcgggcacctgtaatcccagctactcgggaggctgaggcaggagaattgcttgaacccgggaggcggaggttgcactgagccgagatcacgccattgcactctaacctgggcaacaagagtgaaactccatcgtaaataaataaataaataaataataaaaaagaaatacaacttactttttgtatcaaataaattttggtgcacaaacatcataaatgacataatatctgtcacacatcctttagcaaaacaggattgttaaaattcttacagctaatattatgtggtgaagttcttcctgttgaataattaagtggattaaaatatcatatttcctttctgtcattagaaatatattgtgcattaatcagtccttgggcctgagaacatttatctaggttttcatcatctgaaaactcacagtccaatatttcacctgtattatcaattcaccattatcattagagtttagaatgctgctgtctctttccatctatcttctgttgtatctaataattaggagatatatatatatatatatatatatatagagagagagagagagagagagagagagagagagtgagagagagagagagattggtaataatactaatatatataataatattatatatatacacacatacagagagagagagagagagagagagagagattgattttaagccattaactcatatgattgtgggagctgaaaagtcaaaaatctgtaaaatccaaaagcctggcaggatggagaccaagggaagagttgatgttgcaatcttgagtccaaaggtaatccgatagcagaattccttccttttctggggacttcagtcttttctcttaaggacttcaaaattgattggagaaggcccacccacattgtggagggtaatctgctttactcaaagtctgctgattgaaatgttaatcacatctaaaaaataccttcacagcaacatctagattggtgtttgaccaaacaactgggaaccatagcccagccaagttaacacataaaatttaccatcatcagccatcatcatgaggttcataatgtcatgtgtttcttcacatataaatctcgtggttcttttatttttttagtagtacctagttaataaggtacctggaaatatacgttaaataatagaaatggtctttaatatcttaatgaatttcagagttctatcagagtaattgtaacttgtatataaaaactgatatataaaaaacaagtatgttttttcttcctatacgttgtgttaaattaatactaattacctatcatgaaatgaatgttttccatttttcataaatgtatttcatttttaaattaagaggattaatatcaaaacatatttgaataggatttaaaatccaaattacctgttgcgattatatttaattataaatctttcaagtgagtttataataggaaaaatattttttattaaagtgatgtaccataattatgaacataaatagtgttttctactaattgtttttgtcttcattatgtttctttttaaggggaaagatctgggttaacaaatgttttattcatccaccttgaaaattaaacataataaacaaaactattaaataaataaaccaattaaagaaaatagtttttcttccttttttgtgataaagatgattatgagtaaatatattaaagaattttatactcagacaaagtgagctaataagacaaatacaaacagagatgagcccagaaagagatactctacatgtttataggctagcatttttatcttatgacctacagggtcattgtaactaaagtcttgaatttctgttatattttggtacctgtgggcataaataggaatattactccctgatggcatcatgcattttagataaaactaagccaagggttaaacacgtgccatggactgttcctaaaaaatgctctcagctctcaagttatagaaaattgtagggattattattttgtacctactacttctttctttaccaaaatttacttatacatgatttgaaaattgcttgccacctgtctttattctgttgtacttgtcttaagtaaaacatttataaagtaagtaggaaggattaatagattgtgacctttctacatgaaaaggggaaagccgagcttgttctacttttgtcaggaaagagtttgaatagttacctgttactgtaaaacaatcaccccaaacttagtgtcctaaagtagcaataatcatttattatcactcataggttctgtaggtcaggattcatgcattgcttggttgaggggttctgtctcacgatcactcatgatgttgcactcagatgtcaattaggctgcagtcatatgatggcttgactggggctgaaggattcactttcacagtgagttacttgtatagcttgtgagttggtgctgtctagttggtttccctctaaacgagttcctccatgggactacttgagtgttcttatgatgtggtggctggcttaccccaggacaagcaacctatgagttttgccctgagttttctgaaacatgatcccatgttgctttgaatatccccattagacactcccacaaatgtcaatcatactctttgccctaaaagttgcagactacttgtacatgtcctttatcctacatgtgtacaggaaacacgtgcagaataacatgtgtttttgtttcttgaaagaaacaagaacccaccaaaactttatagctccgggacatgatgataattatctcaggtccactcagcctggctccacatggaaaatatgggtattgtaaagaaagcttttgaattttggaggcctaacaaaaagacctaggaagctaatagttggttatgagataattataacaatggtgatgaaagcaattgcgattattacttttatgttagtgagataaatacataagaatgtccttctttaatttcattccttaatttccttaatccccattcttgatttctggattagaggaaagctatactatctacctgattacacaaaaagactggactgaggggtaaccattaggactcttgttagttgaaggtaataaactatattacttcagtggctaaaacaaacaggagcttttttctcatataaaactagaagtcaggaaacaaatggttgctgatgttggtttatccgtttgacaggttctacctttatcctggagattctttggcctttatttctttagtaatatagtagtaacagcactgaatctaaaataagagcacttggtccaagcactggctctgcccccttagtgacagtgggacccatggcaaattatttaatctctccaacagttaattttctcatctgtaaaactgggatcctgataacttccatactagtttggtgttaggattcaatgaaatgacgcatggaaaagtccttttcaaatggctactcactatacaaatattaatgtcttagtaagctcaggctgctataaaataatgccatagactgggtggcttaaacaacaggcagttgtttttcacggttctggaggttgagaagtacaagatcatggtgctgacagatgtggttcctggtgagaaccttcttcttgctgtatcctcgtatgttggggagagaggtggtgcagagaggtactctagtctctcttcttgctcttcttaaaaggacactaatccaattatggaggcctcaacctatgacctcatctaacccttattatttctcaaaggccccacctccaaatatccattgggggttagcacttcaacatacaaattttagccggcgggggggatgccagcattcagtccataacaatcaactatcctcattattgagagttccactaggccttctcaagggttgacaatgatagtgccctgctagctataagagtaaaaaaattttcacatctagaaaatgggtgcacgaatattggtaactgttctaatgtctatgcacagaatttttagaacttgctcgagaaatttgtctttcctgacagtgttgcttctcttaaattccagtcgagggccttgaaaaaaataggttttccatcaagattctctgaatgaataaatgaaatgctctgatattttctttcaatattaagataaagcaaaatgtatacagaattttctattttcagtgtttccaattactgcatggtttggcttattaccatctctaagtctaaccctgggtcataggagtaaagccattgggggtcccctacaaaggatacaaggcagtggtagatacaataagcctgacaattggagtcagatttttctctttcatacaggaaccatggaactgttgccctgggccacagctggctctcagaaaaacgtagaactggtcgaggaaaggaaaggcagggagtccttgattcacttgttatcagaaaattgtctgttcaaacaacagaatgtttgaaaagataaaatcaagtctcaaatgcacagaataagaatgaggggaaaacacctttctctgtaattaaacagaaaagtgtgccatgaagtgataaaacccagtcaacctgaaaatgtgaacatcaagtgtaattgtgcagaacgataaggtaatatgaacagcacaggaatatataggctcacgttggcattttaaagcaatggcactttacctgttcctcatgaaggatttggtttagtctaatcccttgtaggagccactaagaggagaaggcacagtccttttgggatgtaaaatggggaattctttctatgattacaagaatttgtaaattgctcagagttttaggacagcaggttatgtgtctctcaatgttgggtaccatgccaaacgtactttaagagacatagcaataaatagaatgggattcatttttttcttaatgtctggcagggcaaccaaaatgcccacgtttcccttcagtagcttggtattttggtaactaaaaacatgttccagggaactccagaatatgaaacatttcagacaatttgaaactgtcaaaattttcacttctttatgggacaaataaaatctaactttattcagattttaaagtatctcataaaagagtaatactttagatttgtgctgtgctttatacgaattggatgaggaactcttatacatatataagtggattttattttcacaacagtccctatggtagatattgtccttattaagtaaatgagagaaccaactatcaaagatattaatattttgcataagatcacacagatagcggaaccaggatttaatccaactcctctgattctaaaaataggtgttagatgggtattctttccccaaacctatgctgaaaggaggctacatttggagtcagttattgaaagtttaaatatatgtgtatatatatatatatatgtgtgtgtgtgtgtgtgtgtgtgtgtgtgtattcttatatactcatgcatgtagatagttataaagtacatgcttatatgtcaattttatatatacgactgatatataaactatcaatttgtgatagtttatttcaattaagttcaaacatattgggtatttattgactcatgggacttaaaatttctcagaggcattaatttctatgcctttaagcaaaataatgtttagcccgttttagaaagataaaaggctaacatatgttttgtttttgtttgttttgttttgttttgttttgttttgttgagatggagttttgctcttgttgcccaggctggagtgcaatggtgcgatcttggctcacagcaacctccgcctcctgggttcaagcgattctcctgcctcagccatctgagtagctgggattacagacacgtgccaccatgcccggctaattttgtatttttagtagagacagagtttctccatgttggtcaggctggtctcgagctcccaacctcaggtgatccacccgcctcggcctcccaaagtgctgggattacaggcgtgagccacggctcctggccgctaacacatgtttttaaaaaataaacaccattcgagtaggaaaagtgggagaactggtggttcagctagagatacggagatgggagggcaagttgctttctcatgttgccacatctgtaagttacaaatgccatagattaggaatttcaacgttgttgtgtctctctgaggacattctccatgtagtatatgtttcgcctccctgatggacagtaagcatcaaacggttactcctttatatttgaattattttaattctaacatcttgttctgaaaataacgggaatgccataaatacttactgattgattggactgtctcgcaggggagctggcagctagtgtaggctacaagctgccatcatcatctccatgaccatgagtcatcactggaattaccctaaagaggttaataaaacgccttgtttgaaaagcaaacaaaaagccagaagaaacccaaagcaaacagacccagactttgcaatgggtagtgaattttcagtcttaagggattgagagtccttttagtacaatctctcataaacatataacagattttaaaagcaccttggtctgattccagttcacatacctcatccttgcagaatacaacatactaggccatttgaaatgttcctcagtttacttttggaggatctgctgatttgagcaaaatggaaatgaaatgtatatagaaagctcttaatttttttttttttttttttttgagacggagtttcgctctgtcgcccaggctggagtgcagtggcgggatctcggctcactgcaagctccgcctcccgggttcacgccattctcctgcctcagcctcccgtgtagctgggactacaggcgcgcgccaccatgcccggctaatttttgtatttttagtagagacggggtttcaccgtgttagccaggatggtctcgatctcctgacctcgtgatccgcccgtctcggcctcccaaagtgctgggattacaggcgtgagccaccgcgcccggccagctcttaatcttaagaagttcagtttcgcagctccccccccaccaacccccaatcttgaaagcaggaatttggattagggttttttaataaaactttctttttcttattaccatgatgttttttgagagggtacagagaactcattaaaatgttatgttataacttaagacaaaatgggaatgagaatttgcattatataaacaaagtgtatgactaagtaacctgttacatataaagtgtttgactaagtaacctgttgtccctaggagaagtagaataaatatcaacatgtggcaactaacagaatgtgttgtgatcactaaagcagcacattcattgactttacacttcattaagtaggtaacgaattttacaaattttaggacttaaccaggctgtccataatactttgcatcagtaagtaccaaaatctacgatagggcacttcggagttccttaatttaataatattgataatattttgtttacattttgatttaattgtatcatttcattatttttgtgtcctgattctaaatatatacgtcaacaagctatatggccattcaaaacaggtaaactttaaatatgtttttgacatagaaattatgtaacagtcttcatcatgagtataggagtcagatttccaattgaaaatttcatcctctaaaatacttggcatatgtatacagttgtctagttcagacaaaaaagtattgaatataaagttgattttgtaaaaccagaattggcatccttaaggaatacaaataaagggaatcttaagataatataataatgctgatttgaaatgaaaattaataaaattgttattctattttagtatgctaaattggacagatccttatttcattgaaaaattagattcttcagtatatcagtgcactgtgctaataacacaagaagattaaattatgtccatatgtgatttggtagaatttaattataaatataataaatccttcaatatgtacagcagtgaatattccaaatttatctctcatataagttgtgagcaacttaaggataggcaccatcccttaacatacctagattaagaacagtacctagaaaacagtcatcaaatgcttcctaaataaattttcaccttcaagcttatggcagcaaattaaacatagattgacccttttctaatagagacagaatagatgagactgatgacttttttttataaatgtgtaagtctgcaaatatttagtaaggatctaatttacacaaagaaatcaacctagagtgagattattttattcatttcccggaggctgtgactgaattatatttgcaacttgccctaatttttatacttaataatttgcattagtatttaaattatgtgaaggaaaaatataagtttaaaatactgaaaagtatattcacacattcatcaaatgttgattatgtgcttacagtgtgcaaggtattggggctaggaattatgtggtgttccaaggaaaccatgatacagcctctttcattacagtgtttattattaggtagaaaaagtaaaattagtataatattagataggatatatgtgtcataggagtaatataaacaatattttatgaacaatgtatgaaggtataattttgttcatttatccatttatcgctctgtacatccatccgtttattcattgttcattacttcatttaataatactttagtgaccattggaaaagggatttataaaagtgagtaaaatgttaatcattttctaaagaagttgataatctagggaaagacaaatgtgtaccaacaataacttggatataaagcataaattagaggtacaagcaaagaaaaatgaaagtacaaaggagaaaaatatttggctgcatgagagcagggactgtgtcttgtttcatcatagattttccagaacctagatcagtgtttggcacaaagtaggttcagatgagtttgtgttgactgactgtctactgaagtaattgtggaacatatcatagaagaagtagatcagaggctggatcttaaaactgggagaaatacatttcagctccgtgaaaccccagaagtgatatttgacattagaaagcacaaagtcacactctaacagtgacagtactgagtgaagtaagaattttctgcaccccttcttcttcttccactcccattaacccttgttagggtgagaaatagcagctggtgaatggtagagaagactagcaagacagaaagaggaagcccaccatgcccactaccccaggtagtaaaggacctgtccacttccatcctcttctaattgaggaagaaatcatatatgtgagttcagattgaagtattgattaatatattgagctggatattctaattttaatgtctcgatatggagcaggactttgtttccttaatgatgaccagaaaagacatgaaacttacccatattttcacccaagaacagaacagaacaacctacttgaacagatttaaagggagaaccaaaggcagataaagttgtctttattcttacacagcataagtcctgattattcatcaatttatacattttatgaatttaagaaaaaaggaaaggaagactataaagggattcatatcaggatacacatgaaggtaatgtagtcagttttttagtggaaccaaaatattacagtcatcactgaacgaaaatattacaatcattacatcattcactagattaagtgaataaattaaaaatatattaaataaaattaacaaagacatgagcttttcaaagtgtgtggtaacctggagcaataagcagtgtagttggaatgttacctcttaaggattatcaaagaggctggctgttcagtaggacagtggtatggtaaagcaagcttgctacattgcagaactccagagggcaacattctaattatctttagctatggggtctgttcccataggataactataacttagtaggttgacagagcctcccaagaaaccacagcagtgctcaattgtggcgaattacttctctatcccatcaaaatgtcgtgattggacccacaactgtgcatacatttttttggcattttcctgccagaagcatatttacatttctttaatatccagtcatatccttcccttatttaaaaataattattcagagaattccagttttttgtaatcctctcttctatgaattttagcaacacttatatacagatacttgatattctggagaaatatgcttcaagaccatgtggattaacagattttcaaatgccgttatagtatatgtatatactatatatgtataagtatgtgtagtccccaaaatgcgtactttaaaatcctcataatagatctcttacagatgaggaaaagaagatgtagaaaggttacataaagtagctaacaagtattccaaataatattgaacttcagtctgactattccaaaattgcattcttaactctgatttctatatttgttttccattctaaactgtgtattgtgatataagttcctcactaaggctctttttcagggtcttcctaatactaaagtcactcttacaatgagtattttctttacgtgtgaaatccaataggcaaaaaaaaaaacttggcaataaattttaggcattaacctcatgccaagtaattatcagaaggctgtaatgctttgaaacttcacaagtctgattttaagataatggaatgaggcttgcattgtgaactttcttgatgctttacattgcaatatgctgtatagattgacttcctaaaaataaaaaataaaaaaaaagatttgtagagcatactgggaaggtcttgccaattaaaaaccggagattggctgaaggcttgcagcaattgaattttgaatacagatggtgtcaaatcgagtgtttccatagcaacagactcttccttaataacttttagatgggagggggtacataaaagagaaaaccatcttttagcagatgtatgttttcagcatgttttcagattgattttggaagctaatttgtacttaactagtgattgttttaagtggatctaaatattactaaattctcctgaggaaacattttgagaataacagaaataaactctaggaactttataaagacatgaaaagggcacaattttacaaaacctttttttttttggtctggagccaatcaaacagtattttatattgagtatgacctatcaatagtcaaagagttcttgattcttaatgcctgttaatattgaatgtttagaatatgggtaaaatcaaggaaaaagtgctatgtatctcatggatttggaatatcttaatatactctttcttcaggttaatgattatttttaaaaaatgatgatataaatcatttcaggaaggactgcataaagaggtcattgatagagttcatatcatatagcagagttgtcgtagatttaatgtccaatcctcagttttgcatagccaacaactaaattttagtagtttacctagagatgatcaggctctgggagactgattcatgctacacaaactcacaaggcactggtttataaaccatttgaaagaagaaataataattcaaactattattttacaacaagactggcaggaaaatcaataatggtaatgtgttcggggtgtcctccccagtgaggactatccagaagaccaaatgatagattattgttcaaagtgatagaattgggagaagggtaataaagcattatgaaaggatgcttccttaagtgagaaaagctacataaactacccatctttactattctagatgaccttaaaaatattaatagaaacagagaaacagacaattcatctcagatggtacaaaaaacataatagcacatgtttgctccctggcttccttttagattccctgcaagaggttttcccccaaccaccaccatatacagatatacagctttaccttcactctcctattatctgtcacagaacaatataaaactcagatatgttagtataagttaatagttggtagctttatgttaatgacattgctacctgttacccccagattcatctgggttacttcatccccaaaaccctttcaaaacgacatttcccacaaagatttctagtattactggccattcccggacatcttgcttccaacataagaaattctgacataatagggatataagaaggccttgggaatctgtatttataacaagctccccaggctatctgaggctcagccagtttatttttgcagatagctattactatccacaatctcttttatcctattgtaattgcagaagaaaatctttctttctagtttctttgaaatttctggaatgttaggacttagagcctctaggaacttgtacataaaaagagagacttaaagagatatcaaagtagagatagagatagatacagataagtgcatagacatagaagtagacatatataatagaaacatatatgtatacatagaaatagaaatatgccatttagaactcttaagaaatatgtgcactcttaaaatatagtttaaaaatgtaaagaacttgctattaattgaaaatagcataataaacttaaatgaaataaggaccccaaacgcaaatatttctctctgacacaccacacacacacacacacacacacacacacacagacagagagagagagagagagagagagagctgtacaataacaaccaattcctgacccagataaagaaaaaatttttatttatcttctttctcattctattattattttttctagattaaattaaaatggtaattatgtgtaagaacaagcattattgccatataaacaatgcaacaaaggaatcaattgaaaattaagtgaaaataaaaggtacagcttcgttaaagacccagttcttagagcttagtctcaaactctttgtactctgcactcttttcttgatttgactcgattgattgattgattgattgattgagtcagagtctcactctgtcacccaggctagagtgtagtggctcaatctcggctcactgcaacctccacctcctgtttcgagtgattctcctgcctcagcctcctgagtagctgagactacagacatgtaccaccatgcccagctaatttttgtatttttagtagagatgggacttcaccatgttggtcaggctggtcctgaactcctgaattcaagtgatctgtctgccttgttcccccaaagagctgggattacaggtgtgagccaccacgcccagccgattttactctctttagaactgcaaaagtaggaatctagctcatatgcagacattctagaaagtttgatttcaaaagtcttctcaaaagaaagagagcaagagcaagaaagaaagcagagagagaaagcagaagataaaatggcattgtttgaacagggatggaaactgagtaagaaatttggtcactaaacactttagtgtctatcatttaagattgtaatttggttatttatcactggaaagtgattaataatctaaaatgcattttataatactaatactattaaaacattaatttttggagaaagtttattatagattgatttatacttaccactgaatattaaaatgtttaatggaagtagtttcaaatagtatttaatgatatagggaattattacaacattaatgctcaggaaaaaaagtaggatatggaattatttatgccataggatcctaattttgtaaaaaacagagaaaaccagcaaaagaaattataactggaaggaaatacatcaaagtggtttgcagttatcactcatgaaattgaggtgaacttgatttttttccttttatatccatccgtgttttaataccacagacatgctttagatctgcccgtatattgtggctttcagagggtaataaaccattgtgactcagaaatagctaagaatttttatctctcaagaacaaattttcactcccttggggtgtcattatctgttgagaatgcatgcaatagttcaagagccaaaagactctgattcagtaagtttagggtagaaaaaaattaagtacatttttaaaatagagctctggtgtttcaaaggcaatgtgcaaatatacctacttaatattattctaattttttcaggatagctgaaatataaacatctatttttagtaataacacaaatgatggaatgcttttacatatttataaatcattaaggatttgctttttgtttctactgtctggaacatataaatttgaacacaatttagaacaacattcaggaaatatgatttatttattaccttcttgacctttattttatttttaccatctacttttatgtaagtcttttttttcaatcattgtttatttctttacttttccttccacatagaattaaagggagattcgggcttagtgtccttaattcatagttccattgtggctattaaaaggtgaactgaaagcttgcaaacacgtggtaccttgtagataattttctccagtcagacagttagataaaggcctctgaggtttctggggtcattgttgaagctatgttttaaaatcctatatccttctctcattgttggttccttttcacaacacagaagttttcttttttttaatttcaacttttagatacagaaggtgcatgtgcagatttgtcacgtgggagtattgcatgatgctgaggtttggagtacggatcccatcgccatgttagtgagcatagtaactgataggtcgtttttttaacccactcccctccctcctccctctagtagtccccagggtctattgttcccgtatttatgtccatgtgtgctcagtgcttagctcccacttataagtaagtgagaacatgtgatatttggtagaacttttcatttttaagttaaaaaacaaaacaaaatgaggatgagtggaagaactattcagcacagcaggttataaaccaattaggatgatgacgccctgaatggagattttcatgaacatctcatattagctatttcagctttggtttttttaatgttcaaagtaaatagaataatgaagaggctatttaggaaggtttagactgagggaaaaaaatcctttcattaggttccaaataacggttagcttattaaacagcaagaggcagagatttagcagagaaaaaataaaaagatttaaaaaaaaacaacgagattaaaaggtcagtaataccattggaactggcagcatggcaagtttatatcagctatcttttgttttggaacacaactatgctaattctgttctgaacctcttgctaatgcctgtctcaagaaaatttaacatactttatctgtgtgtacaaaaatacctaaggacaaagctattacccaaactgtattcagattgaaagaatccatatagaaatttgcagctaacgtattagtcagtgtatgtaatttctactgcttcacagcacaactctttctaattttcaggagcaatatagcaactgcttgccagccaagagaaaaccataggagcattcttatcattggagccaacattagttctgcctacagtgactaacatagatgcgtttattgctagctggaattttccattggcactagttacatgtaataagttagtgctttcaaatggaccgtggaatataggaaaactagagtctgacgtaaccaaaaaaaaatgttgataaactcagagattatgaaagagaggagaggagtggtttttgtggaaatgatagaaaagcaaaaaaagatggcaggatttggaaaaaagaaaatcaggttagagatttaattagtaaaggagctccttttaataattatataagagtatgagtttagagtaactgcctggctaatatgtacaatcttcaagttcagtcgttttccaaaattctaacttttagcattttttttttgtaaattttaagtggaaatcttccacttttgttgactaacttggctacctgatattttactcaacctcctactttcttgttctctacttcttctgagtctttgcttccacaatgaggtagctcatattccttaagtttcctgtctggttttgcttttttttttttttttaacagctaaaataaactctacaagcatttctatcattttctttacatccaatctcttgtcagccatgtcctaatcactttggtaaagtatcagtgaccacccaagaggttcactttgcttcgtcaaaggaccacctgtcatgctttatctccagagcttctgccttgaaagtaagaataatataacctttcctgaatgtcttatttcaatttcatgcatttgatctgcctcttcagaccattcccaaggctttgcccttgttctttaccctcatggcttcagttattcatcactatatgaatgacagctctcaaactgacagctctggcctctcacctatttcatctattccatatggcaaactgtctatattacatttcatcatgagggataattataattccacattcaacaagaaattgtgggtccgtgttgatttccaacagcaacctttattttttagactatgatagagaaagggtcaactttctctcttacttatttatctcaaataactcaaagtcaagctagaaaagccaagcaagtaatatttcccaacaaagcagctttaagcaaaatgattttcagacacgacatgcagcctgtattgtggaagaagcacagtgacctaggtgtactttgctgaaaagcagtggtcacagtccattagtttcatctttttcctgcaagagagaaaagtatggcagggccaagactcctaagaccccttaaaaaattgtgaggtttttataaccctgttcatttcccatcaaaagcattcatgaagcacctgccatgtaccagatgatgcattctaggcagagggaagaacttgggcaaagtcctgtacattttatcttctaaatcttactaatcttttcttatctttccatctaccacccaccatcaggctgtgcctggactcctatgctaacatcttactctgtttttctgcatcttttttgccctcccctccaatctactctccaattagcaacatgactaatgttttcaagcccagattagacggtgtcacttccctgctttaaacctttcagtggattcccattgcactgaggttgaagaccaaaatctttaccataactcacaaggccactgggagctatgaaaattttcttttttagtttttccttttaattagtgatgcattcaataagtggagtctatcgtgaaagcatagattccaaaggcatgtgaatactcaattatgtaatttacttacagaatgtttattacttcttttttagctttgattttgtatacatcctaactcaatctcagttatataagagattataaaaaagtttgtgatgaatgcatacataaaggaacaaataattaacaaatatataaagacaaatcagtattgaatgaccaaatggctctttatttattaaagaacttagaaaaatatagtcttgcttgagaccaagttctggcaacgtatgtgtgtctttttgtttgggttaaaaagcattagttttatatgttttaaaaggataggatcttcccttggctgcaaatagtataggcaaaatgctattctgtatcttattttaaagaaaataacaatcataccttattatttgctgacagttttgcagtttacaaagcactgttcacatggattaccttattttaaattcctcaattttttttccttttactatgggaattctgtttcaggagaatttccctttaaaattaaggtgattatactattctgttcctgtatttcgtagccatatgtttcaccaaggtattgtctctctccaggtctttcttctctggatgtatagttatgattttccaggaggtaaatgaaaacagtgggagcaattgacagagtgttttttgtttcccataaacccaagcattgcatttaaggagctgctgtactattgtaagagttcctatactaattttaaaagttcatttacatattttgtagatttttaggataagtcatcagaaaaaaattaaaaataaatttacatattttgtattaagctgttttgttacttgaatggggattattggaacgaggaaagaattacttttatctccccatttttcaaatcatttactataacattcatgaattgctgaagtttaaacaatcaaaaatatctgaaaatggagcctaggaagggtaacttatgtctttcatactccttcctttttggtttttctaccagcattttagtctaaaatatattttattttcactgatcctgtgtttgtcttaataatatagtatgtatgttaaatgaaccagaattcattgatctttttttttattattcctctttttgcttttctggagaagcatttgaagaaatcagttcaggctacacttcatcaattcatttcctcatcttccccttaatacaaaagccccattttcactcttcaaaacatttgatcacatacttaattttcatagcattgactaaatgtatgtgtttattttgtttatatattgcatatttgtgatgattttcacttttacagtttaggcatgggtaggaaggacacttacatgagtacttaagttcttggttatgacttgagaaactcacaaggtagcatggaatggcacgtaaacaaggctttgatagggtgaaagggaattatcaggacaaaactgactagtggcagtgacttttgagcagagtgctgcaaactgaaaaggcagagagcattgtaggcagagagaaagcatagacacatgtgagatacatgtgaaatacttagacaaatgtgaggtgtgtggtaacattgtacatacctagggctccttcctgtgtagctgtaaagctggagtataggcatcacaacaggcagcagaagccaagaaactagaaaagtagacaaaggccacgttataaaagatcttgtaggataggtaaagagttttaatactatcctgaaagcagtgtggggtgggaggcatgacattaaggaaatttaataagtgatgaaagaccaagattttcatcttcagaagacttctctggaggtgggtggaccacttgatgtcaggagttcaagaccagcctggtcaacttgatgaaaccccatctctactaaaaatacaaaaaaatagctgggcatggtggtgcatgcctgtaatcccagctactcaggaggctgaggcaggagaatagcttgaacccaagaggcagaggtggcagtgagccaagatggtgccactgcacttcagcctggatgacagagggagactccctattaaaaaaaaaaaaaaaaaagacttctctgactagagttttaaagaaggatggggagtgcaaaaggctaacattaaatcagtggttctcatccctggctgcacgttagaatcactagggggagtttaaaaaaaatgccaatacttggactccaccccaaaccagttaaatcagagccttaatagggcccagacattcgtagtttttaaagcagccctcttgattcaaatgcacagacaaggttgtgttccgctgaactagagagaccatcaggaggcttttaactaaagcaatctagggaagagagagatgaatgatatagaggccagaagagctattaaggagaagtgactcggcatcttcttggttaaagtataaggaagaaagaagaatgaaggataatttgcatgtttctccttcagtgactaagtagaggaacagatgtgtatcagtgattaggggagaggaagaatgaagatgatgtaatccagtttggatatgttggctatttcatagagatttagtaggcgtttggctctatggatacagagttcaagagacaattcttagcttaaaacacagattttactctgattattttagagatagtaaatgaagcaatatacatacatgaactcaccagagagaatatgtaaagtgaaaacaaaaagatcaaagggagacccctagggaatagcaacatttaaggaatgggcctaagagagtgaggagtggccaaataggcagaataaaatccaagaaggaatcttccatattaatcaaaagagaaggtttcaaagagggttcgtcaattggcaggtactgaagggatatctgaaaacataaagactttagactctctaatactgtagcaactttaaggtcactgctatcacctacaaaagtaatttcagtggcaaaagccaaaacgtaatggtttagaagggtatgtgaggtgtggatgtggaaatagtgggtatagactattgcttctcaaaatgtaatcacctgaaaaatcttattttaaaatgcagattttgattcattagctctagagtggagcctgagattctgcatttctaacaagttatcaggtgatgctgatgctgctcatacacaaaccatcctttaagtagcactggtgtaagccactctcccacaaaggaggaagacatagggtttccatcaggggacgcaggtggggtgtaggaccaaaggaaataatactcttttgtcttttgtttggttggttttggttgttttcttcttaaaataaacatggttgtagacggagattgaagacataggaggggtaaaagatggaatcacttctcatagaagatggaagagactggaacattgagtacagcgagggaattaggcatgggtaggagggacacctaaatctgaagagaaggaggtaaggaagaattgaaatacagaaaagttctgtcagtaagcaatgtatggaattgtgctttttagccatagtttctgttcaagaaattgttttccatttatttttatttcttaacttgaatagttggatggtggagtatgcttgtaaaaataagagtgaggccactttgtttttcggggttaatttccgttttctgcactcatcaagtaaaagttgaagtggcaaggtgtagatatgaaattcagtgtgtgctaagggagaaaaaaatgctttttattctacatgattttaaaaatatttatattccaacaaatgcatcaaatttgatgtgcaaatttacagtgatgaatgagttttattgtgtgcattgcatgctggtgacatggtaataaatctgtggtgctagaattataatggtcccctttagcttcgctttaatgaactcttgctgaacacttttgagttgttagtactttatttgctacatttggcacttaattagttaatgactgagatgctggaccgatggatcatctaatgatatgttaggcctattatcacatctagatagtttcttttctgtgacttgtaagtgacctaagatgataaactgaaatatttttgcatagatatacatcaagcttttctcctaacttcaggctttcatcttaagcaatagtttccaacacccccaaaagagaagtcattatgtttttaaaaaaattattcattttaatgtgatcaaataatatcacatttcagcattcacctatttaattaataaaacaacttacatgtttcattatgactggatgttgatattttttcataatctattatcctccaaccagtggtaaaaacccaatcctcctctcacccagctcatctttccgtatgggaagcaatacatacttccctatgttttattaccaaaacaggagaatgagctttctttagaaggttaactcattttctctattagaatattcagcatacttttaaggaggtaatctggtctttgacagtctgttgattagaaaattaagagacctgcctaaattccatttccaactcctctccatacacattgtgactttgagcaaaacgttttgccatttccactcgtataagttctgtttagtatctttaaacttccatatcccacagatggtatttttttcttcattggaaagtggtgttagtgattcagaaaactgcttaaataatacactgctttgtgttttctgtgagagaatttttttttttttttgagacagagtctcactatgttgcctaggctggagtgcagtggcgcaatctcggctcactgcaacctctgccgcccgggttcaagcgattctcctgcctcagcctcccgagtagctgggattacaggtgcctgccactgcgcctggctaatttttgtatttttagtacagacagggtttcaccatcttggccaggttgatcttaagctcctgatctcatgatccgttcacctcggcctcccaaagtgctgggattacaggtgtgagccaccgtgcccagccgagagaacattttatctaacattctattttaaaatttttcaaatacacagaaagctgaaagaattgtacagtgagtgctcatgaacccactctctagattttgttgtatcactttacttctttctctacccgccaacccctattattttctgatgcccttcaaagtaagttggtgacatcggttccctttacccctaagttcttcaacatgcatgtcattaaccagagctcaatatttgttcacatttcttttgtttgtttgtttgtggcaaaatttgtatagactagaatgtgtaaatctcatgtgtattatgaaatgagttttgatgaatgggtatacctgtgtgacacatgcctctcttaagatacaaaaaaatagccttggcccagacaggagggaacattttttaggttggcttgagtttcctttaactgacatgtagcatgactgaatatatgaccataagattgccaagttgaaatttaccaaaggtccatccaggggaacagtatggctattgatacgtcatttgttcatctaggcactgggctgggtgagttcttcacaaaaaccttgtaaggtgagctttcagctctgacagaggcatcaagaaacgtatttcacaaactgttagagctgaaaacatctccagggatcatccaatctatcctcctttgctttatgactcaggatttaagaagccccagaaaagtccaacagtgttaccaaagtacacgattgcctatttacgcccctataattgagagctgtctaggggtcaggtacttttctcagtgccttgtgtacattatttccttttatctttctagattattaattttcttgttattatccccatataatagaggagtaaacagtgtgaaaatagcactaaactgttgatcttttccatgttccaaactaaccttaaatgttaggctaatattataaaattttaaaatttagtcatttgttctgggtctggcttccatgaacttaaccaaaatgcttggctgtttctgcattctagctttttgggatttagagaaaaagcaacttggtcatcatagtggccaggatttatttatgtgccaataactcccctctgtttttagctttttgatctgttacatctcagatactttattctctatttgtaaaacaaccacattcctccttttctatatctaagtgaaaaaaaatgcccgttcatactagctacatggttagcatatatgtttcttcctctttgtgggtttgagttgaaacttcttttgcaaagcttaactatagataggtcttccacagaaccctgtttaaatgccttgtggaagtagaagggacatatcttaatattccttataatctgtgttattatttggactttcctcagttccttatatgtctttgtatgtcaaacattgagttatgcttacattactctaggtatagttgtgtcctagctttgtacaaggttacaataatggtggtttccttgttttcagcttcattcttgatcatgcctaacattttttgatggttttagcctcggagaacagtctactgctatttctccctttttcctgatcccaacaaatagtttagaaatctttgtcttaactgcaattgggatcatttttcctttagagttgcccacagttagtcatgtccgtcactcttcactcactcaaatgacctcaaaagatttacctgcaatttaagcctttcaccttggcattttctacctggaactctggcgtactctgtgggatcagtgagatccatagtgtgcactccctagcagatcgtgaatgtttgttgataactataattcattgtttagtcttgtctatacagagaagcagtagcaccttgctttagtaggatcctttatgcttttattcattattgaattttatcttcacaataattctgtggttctgcagttgtcattatttcagtttgggagttgaggaaactgagatcgtggcaaatcaacttttcccatttaaatccactatttcatcgctaatccagggttataacccaagactaactgctagtcaaagttgctttctaaaaatcagttacacagacttctaattctcgtgctgtacagtcagtgcagaaattgcaacagaactgttctttgttctgtagcaatgtgtattcaaaaggtaatcatttcttgtgtataaataacattcctccctaagagagatgttgtgggaatttatatcagtcaagaatgtatatcgataattaaacatagctagtctaaaaaacttgaagtgaaagattggttcgtattcaatcaactgaactgtttctttctctgcaatattgtggttcttgacatgattgctgagtttccaatttgacacttctggaggttcgtaaatcaggacacatgctgggtctcagtctgtcatcctgagtcttagcattggttatttatttccctttattacccaacatctatttactgcacaaattagtcgagaagctttccatgacggacctttgtgagaaaaaaaaaatgtgtacattgggtagctcttcaattacaaacatgcacagattgtctgggtttatgtgcatatactttattattatttcacttttgtatgtcagatgaatttggtgtaaatgtaaatctaacaatatgggctctagtggccaaatacattgccataatatgtttttgatctgtcagtctcctgggtgaagtgtcgcaagtgtggtaaaattctgtagtataaattgatgctcagttatggacaattaccaggtctatatgatgtcagactaccacactgatccacttttaggataacagcttcgctctgatgatcttcagattttagatttgctttcattccttgacaaaatgaaatacatttaaaacttctaaaattgtcttttgtatatatttctgcagggtctactcttgggactactataacaatcaattgtactgctttgtttcttttattaaatagcagaatagctgcttgattcgtctgtatgtgctgatgtgtgtctgtgaatctagtccagttcactgtccaataagaatttctgaaatgttctttgtcacatcaatgtacagtcaaaatcgtattgtgtttgtagcagaatgattgcatcttttattattcacagcagccaaaatgacacatatttcacacgtgacaccttttttaaaaaagatgaattgtccaaagttgtatgtagaatatatttcacaaatcaaattccctatttaataaatggtgctgggagaactggctagccatatgcagaagagtgaatttctataaatagaatgcaactgtgtaaatagcatccaaatcaagaaacataatataatatagccagaagctcaggatcccccttcatgtcttctccagtcatgaacatttcacaagggtgactactatccttacttcaaaagttttctattactttttcctgtttttgtgtattatatgaaggaatcgaacagtcatatctacttgtctgtggctgtatttttccccccaacaatatgtttgtgagattcatccatattattgtatgtagttgtggattgttcacttttcttactgaataatattctattgataccacagtgtatttacacatgttgatatagatgagaaattgagtagtttccaacatgaggaaattgctgtcaacaattctgcaatccatagccatgctatcaacagtctagtacatggtttttggtgaatatattaataactatgcatttctgttggatatacacctgggagtggaattacaactcaaataatattcattttaaaaattttatttcgtttttagtcgacaactatattatggggtacattgtgatgtttcaatccatatatatacattgtggaataatcaaatcaggctaatagcatatctatcacctcaaatacttctcatttttgtggtgagaatatttaaaatcctcctttttagctatttggaaatatacaatatgacaatattagctatagttcctgtgctgtgcaaaagaacaccagaacttattcctcctgtctaactggaactttgtacccattgataaacgtctctcatttttccatccacccaccactgcagcttttgatcaccaccataatactctccatttctatgagttcaactttttttaaactgcacatacaaatgagattatatgatatgtgtctctctgtgccaagtttatttcacttaacctaatgtcctccaggctcatccttattattccaaatgacagaatttcctaggtttttaaaattttttttttatttttaattttttggggtacatagtaggtatatatatttacggggtacatgaggtgttttgatataggcatgtaatgtgaaacaagcacatcatggagaatgaggcatccatcctgtcaagcatttatcctttgtgctacaaacaatgtaattgtacttttagttattttttaatgtacaattaaattattattgactatagtccccctgttgcactatcaaatactaggtcttactcattctttctaactattttttgtagccgctaacaatccccacctatcccctacctccacactaccctttgtagcctctggtaaccatccttttattctgtctccatgagttcaatagttttaatttttagatcccacaaataagtgagaacatgcagtgattttcgttctgtgactggcttatttcatttaatgtaatgacctccagttccatccaagatgttgcaaatgacaggatataattcttttttattgctaaatagtaccgcatcatttatatgagccacattttctgtatccattcgcatgttgatggacagttagcttgcttccaaatcttgcctgttgtgaacagtgctacaacaatgtgagagtgcagatagctcttcaatacactccctccttttcttttgagtatgtacccagaagtgggatttctggaacatatggtcattctctttttattattttgagaaacattcatactgtctttatggaggccgttactaattcacaatactaccaatagtggataaggtttccttattctctgtatcctcatgaacacttgttatctttcaactttttgataatagccaatccaaaagatatgaggtgatatctcattgtgattttaatttgcattttttgatgattagagatgttgagtattatacatatatgtgtgtgtatatatatatatatatatatatatatatatatgctgtttgtcatcttttgagaatgtctattcatatatttgcccatttttttattagggttatttgttttcttgttattgagtagcttgagttccttgtatattttggatattagcaccttatctaatgtatgatttgcaaatatcttctcccaatctgtgggttgtctctttattccattaattgtttcctttgctgtgcaaagctttttagtttgatgcaatcttacttacctatttttgtgttgattgtgtttgggggtcatatgcaagaaaccactgcccagaccaatgtcatggagctcttctcttatgtttttgtagtttttagtttcaggtattacatttaaggctttaatccattttgagttgattcttgtataaggggtgagataagggtccagttttattctgtatgtgaacattcagttttcccaataccatttattgaagagactgtcctctccctattgtgtgttcttgctacctttgtcaaaaatcaattgatcaaaggtgtgtaggtttattttagtcctctttgtcttattccattggtctgtttttatgtacttgccatgctgttttgattattatagctttgtaatacattttgaaatccagtagtgacatacttccaattttattctttttagtaaagacagctttggctatccagggtcttttgtggttccatgcaaattttaggattttttaaaaaaaattctataaagaacaatatgcagattttgttagtattgtgtcgaatctttagattgctttatgtttaacaatattaatttttccaatttatgaacacagaaatctttccatttatttgtgtcatcttcaatttctttcgtcagtgtcttatagtttcaacacgcagatctttcactttcttggttaaattcactccaaatattttttcatgctattataagtgagattgtttccttaatttctattttagacagtttgttgttattgtacaaacaataacaattgttatcgctactgatttttgtaagttgattttgtaccctgcaactttactaaacttgtgtatgaattctaacagttttcagtggagtccttaggatttgctgtataagattatgtcatcagcaagaaggggcaattttacttcatccttttcagtttggttgccttttatttctttctcctgcctaattgctctggctaggactcccagtactaagttaaacaagggtggggagagtgggcatctttgtcttgctcctgatcttagagaaaagccttctacgttttactgttgtgcatgatgttagctgtgggcttgtaatttatggcttttattcttttggagaacatttcttctatacctaatttgctaagagtttttctcataaaaggatgttgaattttgtcaaatgctctttctgagtttattaaaatgatcatacggtttttgtacttcattctgttatatgttgaatcacatttattaatttgcatatattgaaacaaccttctatcccagggataaatccctcttggtcatggtgaataatccttctaataaactattaaatatggttcactagtatttcattgagaatttttgcatctaatttcattcgtgatattggcctatagttttctttccttgtagtgtctttgcctggctttgggatcagggtattgctggccttgtaaaataaatttggacgaatcccttcctctttagttttccaaaagagtttgagaaagatttgtgttaggtcttctttaaatgtttgtagaattctcccatgaagccatctggtcttgagctttcctttgatgtgagaacttttaaatactgatgcaatctccttaactctttccttagctgttactggtcttttcagatttccaattttcattattcagttttggtagattatgtatttctaagaattcatccatttctgttaggatgtccaatttcttggtatataattgttcatcgtagtctcttaggatcctttgtatttctgtgttatcagtcataatgtcttctctttgatttctgatttgatttatttgagcctgctctcttcattcttagtctagctaaggatttgtcaattgtgtttagcttttcaaaaaaccaacttttagttttattgactttttttctattgtttctctagtctctatttcatttatttctgctctgatctttgttattttcttctttctgctaactttgggcttaattcattcttctttttgtagtttcctgaggtataatgttaggtatttcatttgagatatttcttcttttttgatgtaggaatttattgatataaacttccctcttagcactgcttttgctacccccagaagtttttctatgttgtgttttcatttctgtttgtctcaagacttttaaaaaatttcctcttgaatttcttcttttgacccaataattgtttaggagcatattgtttagtttccacatatttcttaattttatatgatttctcatgtaattgatttctaattttatattgtggtcagaaaagatacacgatgggttttcttaaatttgttgagacttgtctgtggcctaacatatgatctatcctggagaatgttacatgtgtacttgagaagaatctgtattttcctactgttcagggcacaatgttctgtatatgtctgttaggtccatttggtctaaaatgtcattcaagtccaatgttttcttatgaatttttctgtctattgcttaaagtggaatattgaaattgcctgctattattatgttataggctatgtttcccttcagatcccttaatgtttgctttatatatttaggtgctctgatttgggatgcttatatacttgttatgtcctcttgatgaaataacctttatcaatatataatgatgttctttgtcactttgaacagatttgacctaaagattattttgtctgaagtaagtgtaactaccctgctctctttttgttctcatgtacatggagtatcttttttcatccctttactttcagtctatgcatgtcctttaaggtgaaatgagccacttgtaggcagcacatatttgggtcttgttttttgttgttgtcgttaatccactcaaccactctatgccttttgattggagagtttaatctatttacattcaaaataatgatggatgggtaaggacttactagtgtcattttgttcattgtttcctggttgtcttacagattctttgttcctttcttcctctattgctgtcttcctttgtgttttgatggttttgtgtagtagtatactttgggtcttttgtttttatcattcatgtatgtattataagtttgtgctttgtggatactccgaggcttacataaaacattttataagctgataataacttaaatttgattgtgtgcatatactcaacactttgactctccctcctcccacattttatgtttctaacatcacaacttacttttttttttaattatactttaagttctagggtacatgtgcacaacttgcaggtttgttacatatctatacatgtgccgtgttggtatgctccacccattaacttgtcatttacattaggtatatctcccaatgctatccctcccccgtcccctcaccccacgacaggccccggtgtgtgatgttccccttcctgcgtccaggtgttctcattgttcaattcccacctatgagtgagaacatgcggtgtttggttttctgtccttgtgatagtttgctgagaaagatgatttccagcttcatccatgtccctacaaaggatgtgaactcatccttttttatggttgcatagtattccatggtgtatatgtgccacattttcttaatccagtctatcattgatggacatttggattggttccaggtctttgctattgtgaatagtgcagcaataaacatacctgtgcatgtatctttacagcagcaggatttataatcctttgggtatatacccagtaatgggatagctgggtcaaatggtatttctagttctagatccctgaggaatcgccacactgacttccacaatggttgaactagtttacagtctcactaacagtgtaaagtgttcctatttctccacatcctctccagcacctgttgtttcctgactttttaatgattgccattctaactggtgtgagatggtatctcattgtggttttgatttgcgtttctctgatggccagtgatgatgagcattttttcatgtgtcttttggctgcataaatgtcttcttttgagaagtgtctgttcatatccttcgcccactttttgatggggttgtttgttttttcttgtaagtttgtttgagttctttgtagattctggatattagccctttgtcagatgagtagattgcaaaaattttctcccattctgtaggctgcctgttcactctgatggtagtttcttttgctgtgcagaagctctttagtttcattagatcccatttgtccgttttggcttttgttgccattgcttttggtgttttagacatgaagtccttgcccatgcctacgtcctgaatggtattgcctaggttttcttctagggtttttatggttttaggtctaacattaagtcttcaatccatcttgaattaatttttgtatatggtataaggaagggatccagtttcagctctctacatatggctagccagttttcccagcaccatttattaaatagggaatcctttccccatttcttgtttttgtcaggtttgtcaaagatcagatggttgtagatgtgtggtattatttctgagagctctgttctgttccattggtgtatatctctgttttggtaccagtaccatgctgttttggttaccgtagccttgtagtatagtttgaagtcaggtagcgtgatgcctccagctttgttcttttggctcaggattgtcttggcaatgtgggctcttttttggttccatatgaactttaaagtagttttttccaattctgtgaagaaagtcattggtagcttgatggggatggcattgaatctataaatttccttgggcagtatggccattttcacgatattgattcttcctatccatgagcatggaatgttcttccatttgtttgtgtcctcttttatttccttgagcagtggtttgtagttctccttgaagaggtccttcacatcccttgtaagttgtatttgtaggtattttattctctttgaagcaattgtgaatgagagttcactcatgatttggctctctgtttgtctgttattggtgtataagaatgcttgtgatttttgcacattgattttatatcctgagactttgctgaagttgcttatcagcttaaggagattttgggctgagacgatggggttttctaaatatacaatcatgtcgtctgcaaacagggacaatttgacttcctcttttcctaattgaataccctttatttctttttcctgcctgatcgccctggccagaacttccaacactatgttgaataggagtggtgagagagggcatccctgtcttgtgccagttttcaaagggaatgcttccagttttgcccattcagtatgatattggctgtgggtttgtcataaatagctcttactattttgagatacgtcccatcaatacctaatttatcgagagtttttagcatgaagggctgttgaatttggtcaagggccttttctgcatctattgagataaccatgtggtttttgtcgttggttctgtttatatgctggattacatttattgatttgcgtatgttgaaccagccttgcatcccagggatgaagcccacttgatcatggtggataagctttttgatgtgctgctggattcggtttgccagtattttattgaggatttttgcatcgatgttcatcagggatatttgtctaaaattctctttttttgttgtgtctctgccaggctttggtatcaggatgatgctggcctcataaaatgagttagggaggattccctctttttctattgattggaatagttttagaaggaatgataccagttcctctttgcacctctggtagaattcggctgtgaatccgtctggtcctggactttttttggtttgtaggctattaattattgcctcaatttcagagcctgttattggtctattcagggattcaacttcttcctggtttagtcttgggaaggtgtatgtgtgcaggaatttatccatttcttctagattttctagtttatttgcgtagaggtgtttatagtattctctgatggtagtttgtatttctgtggtgtcggtggtgatatcccctttatcattttttattgcatctatttgattcttctctcttttcttctttattagtcttactagcggtctatcaattctgttgatcttttcaaaaaactggctcctggattcattgatttttttgaagggttttttgtgtctggatcttgtaggtatgcttcattgtttcttattatttttttcttttgtcttctctggctgtgtattttcaaataggctgtctgcctacaagatccagaaaatagcctcaaaagggtcaatctaagagttattggccttaaacaggaggtagagaaagagatagggatagaaagttgatacaaagggacaatatcagagaacttcagaaacagagaaagataccaacattcaagtacgacaaagttatagaacaccaagcagaattatctcagagactacctcaaggcatgcaataatcaaactcccacaggtcaaggataaagaaagaatcctaaaagcagcaagagaaaggaaacaaataacatgcagtggagcttcaatacatctggcagcagatttttcggtggaaatcttaggccccgggcatatccagagatgctgtctgagggccagtcattggagtcaaaaaccttagcagtttacctcatgttctattctattgtggctaagctagcactcacaccacaatataaagtgctccctgctcttccttgcccttttaaaaggcagaggatcctctccctgtggccctcaccaccatgagggttctgcttggcctccactggtgttcacttaaagcccaagggctcttccatcagcttgtggtgaatgctgagagaactgggacccatattttagggccttgggctcccctctggcccaaggcaggaccaaaaatgctgtccaagaacctaggccaggactcagaaatcccagaagcctgcctgcttctctgcctttctgtggctgagctggtacctaaggggcaagacaaagtcccctttacttttctgtctacttttctcaaacagaaggggtctttcaccataaccaccacagctgggaatttgctgggtgacctatgaagccagcacatctcagaggccaagtcccacagtgtactccctgggtattgcaactggttattcaacgttcaaggcctctttagttagtagctgatgaatcctgataggactgagtccttccctttaaggtagcagattcccttttggcccagggtgtgtctagaaatgctatccaggaactagggcctggaatgggggcctcatgactctgcccatgccccatcctactgtggctgagctggtatccaagatgcaagacaaagtcttctttacttttcgctctcttctccttaacgagaagtaaggagtcacttctgttgctgcaagcttcactgctgggagtaggggaggtatggtgcaaccactcccttagccatgccagctggtgtctccctaggtcatgtgggagaccctaatccactggcttcaatatatagagggacgtttctaaattatttatctgtaatttgattaagaagatagacacaggcaataggatatgccaacagattctctctaacctatagttattttaagaaagttagggaaagagaggtcattgattagttttggcttactgaattatttgaccctcccatatcttttaatttatggattttatataaggcacagatattctactagtaaacatgacattaaagatgttttatacaaatgaatgtggttgatacaaaggcattaaataagaaacaaaggaaattcagaggacatttgttcgcctggaatagagatcattagcataagcataagaggaaaataaggaaggaaatgggaaagtcttgagtccattttcaaattatgaaaacttgaaatgcaacaaacaaatagtggttacttaagaagaaagactgaagatgctgggcaaaggttaactttagaaatggcatttttatatcattataaagagaaagtggggataatggaaataatctacatgtacaactcatttgacagacatttattgaaggtattccaaatgccaaacactagtttgtgcactaaggatgtttttaatttttactttttactttatttttattttctagcttcttccgctttgccagagaaggatttttttaaatggataaaatactaacttaggctagcttctttcagaaacagacctttaaacaatgattaatggtgaaagtggtttggttgtaatgtgatcccaggaagtaccagtaggagagtgggacaatgagataataaatgaaagaagccaataattaagccagttatggaactagttattgctttgggccactggggtttgatcctgatgaaggagctctgggagatagtaaacaaacaaacaaacaaaaaacatgcctcaaagttgtcaaccacaagggggtaaaggcaaggaaccagggctaactattccaactcttatccatcattggctaaatgcttcctggtacataaactttccagcacttctggccagcgcacctagcaagctgaggaaaatctctcaggtttgcagtagggcaaatgcttgtactaggacactgctggcatatacttgaaggatgagtgccaacggcagatagatgggccctgacagcatcttctacagattctgtccttgcctttgaggcaaggacactgtctagagtcagagacagaaatgtaaaatgtaaaaatgtaaatcatagtagcacacagtacaagttttaaaatcttaacaaagtgttatgggagaaccacggtgagagaaaatgactgcacatatgagagcaggggaagtctttatatgtgatgatgacatttgagtgggtgttccgttatcaaagatctacttaaaagggaaaaagagtagaattattttaaaccatggatgtaaccaggcgtggccaccctatatgtgaatgtcctgggataattttgtccccagatgtctctctttttgagtgtcattttcatttatgtattcataatataaagaaattgaatagaaagaggtaaacattggtggcaaaaatcccttcctacccataaggctcacagaataatgttgtctaaatgccataacatttttggtaagttttggttctatgggctttggaaattttttatgtaggaactcctccaaggtgatataagcattcagtgtatttatctagataccctagttaaagctactttaagcaggatcaaagtcctcttttaaacttttgtatttgaaagctattcccatgtacaattcccatgattcttgtacaattcctaggagacctttgtttacatcaaaagagtttgtctctctctataagttagaacttgtacattgtagtaatggaaaatccatttcaaagtagcttagacttactcagacaaaatgtattgatcagtgtcattaaacagttgaaagatagacgaggcttgattcaggaattaaatagcatgaccagattctagttttccttctccattgcatggctctgctccccagtatttgttccgtttaattcctcttaattgttctaagatggatatcaggatactgcagaactacgtgctttctcatccatcttaaacaagaagcaatgggttttctcttttagaatcacgaacaacaacaacaacaacaaaaatcctagagttgtttcattggttctgattgaccttacttggaaccataagtccatctttgaattaaccactaaagccagggagatgagttaaaactaagtacacaccatccacagagcaaagagaggtctattgtgggaaaactgcacaaatggaaaaataacaggggaaacacaggagaaggaggtagttagttaatgttcaatacacgcaccttctcagggacttttcttccatctggcatcatctttgtcttttgaccattttccccaatcaatacctatattcatactcaagttttccatatttgggaaaaaacttctcttgacaccaaactcccctctgacttccttcttataatgatctatggttggatagtctacaatttactgtccttactttttcataggtattttttaatctcctacagtaagatttctaccactgcactgaaatcattttgtgtatggtcttcagggaattccatgtggccaaagccaatggatacttttggcatgggctttggaggtctaacttcttgaatccaagtgtcggctctaacaatcactatctatgtgaccttagaccagttatttaacgctgtctttatttcctcatttgttaaatgaggataattgcagcaatagaaaaagaacgtaaacaattatacttataggattgtatgatgattaagtgattaatgcaaggaaagaacaacacagagcttcagacagtgtagatattcaaataaatgttagttatgatttttattatgtcttgtgacatctatgagatttgaaagtgttaatcactcttgtgtttttgaaaatctttcttttccatgttctataaaagtacactttcttgatattcctcctccttctctagtctttcattcatcttatttgctctttgtgttttatttattctttttacgttgtattttccaggagtccattcccagcccggtgttgggctcagtctatgtgccatataaatgagaatgcacttgcatttgaggctttgctttttatttctctgtagtgacggccaatcccagatttctgtctctcccaaaatacacagctatgctatagatccttcagtcctcctgactaaaatgttagttttatgtgtgtgttcctcacaacctcccagtgaataggtccaaaactgaactcattatcttctccatgctcactctgcattctttggataggcagtgaatagcaccactatctaacaggcacctaaaccagaagccaggtaatctgtcttaaacccttttgttttccaagttcttatcataatggctggtgtctaacagatggtaaataaaatagagactagctggctacatggatggatgtgtggggatgcacagagggatagatggattattgagtgagtctctagcctataaatatttttaattaactaataaattatgataatgtacagttgaaggtcaagggtgaaaaagcataccctcagtgggatgcacaccccaaggagccattttaacttgctacataacacacatatgaccacttttttgctgaaagccttctattattgagcaagcattcaaatcccatgtttgcctgaaataatggttcaggttataaaagtttccttctttttccaggattaaaattatcttcctacataataggaagaactgctttatcttttcctaatatctagagatggccttttaaaaatatagactgttttccctattgaaatgaactgtaggatgtacaaaatatttactggcatgaatcaaaagagcttgctatgtttatgtgaaaaccactaggcattctaaaaaatattgctagcatagtaaaatgttagtaattaagactaacgaaagcgaaggcaaattggaatcagagactatttttaaggaatgtcaactgtattattttcaaatacacatggtacataacagtaggatatgagaaaaagtcccaagtatgtgtactaaagtagcctgctatgataagttgaaaaagggtttgtaattggaatatccacagaatatttcagaacacttaaagacattttcatttacactttatacagctttcttataagagcatttacaccatttattttataaaccaaagattaattagaagactaaacaattacaaggcctcaactacgaaagctgttccactacctagtggaacaacaacaatgagacacacaaaacaatggcgttcaaagattagagagagacttacggttaaacagaggttgacatgttaactgaagttgcaatataatatgtcgactagttttgcaatacatagcaaacacccaaacagaaataaacctgataaaaaaacagtagtctataatgtgtgccacttactgagttttaattattctggggactatatttttgatttcatgttacaatcactagttttgtggggtctttctagtcctgatgcttatttacaaaatatctgaagtatttctttctatgtatttatttttgagatggagttttgctctgtcacccaggctggagtgcagcggcatgatctcggctcactgcaacctctgcctcccgggttcaagtgattctcctgcctcagcctcctgagtagctgggattacaggcgtgtgctaatttttgtatttttagtagagactgggtttcagcatgtcggtcaggctggtctcgaactcctgacctcatgatccacccgctttggcctcccagagacctgggattacaggcgtgagccaccgcacctggccatctcaagtatttctttaacttataacttcacataactttgtggaggcaacagggttaattaaaaaggactttacttacataacaaaataagaagcatagttttatattcctgtgccatatacattttgtttgtccatctgtagccattctttgaccttctctcccttgctctttattctgggaggctgacctctgtcatcattgggctcccatgccctttggcttccagttggtttaggcacccaagagccctagaaggaaattgaagacaggaggtaaagtgaggtcaagatatttattctcctaattccctccctttgaggttgccacaggctgactatgtcctttgacaaaaggttattgctcttctcagggtggtttctcattccaattctctgcttttggccacttttccctcccctcatcccttgggcctagatgtagtaacagctctactgttgcaaggttcttgtattatctgtgatggtttcttataccctgcttatcttgtgatttgttgctttgtagataaacctctcagattatctaggcaagatcatagaagaacacgtatgtccagctaagatattccagaagacagtagggaaacattgaagggttttataagagggagtgcagtgatcagatttatgttagttttaatctttaattggggtagaatttacattctaaaacagagatttgggtctgggaggatgatatagagcctcttatggatgtgagggcaaaaaatgatagaggtttgcagtgccaatagaaagaggaaagaagttatatatgagagaaatttgtaactaattatatgaggtgttgggtgacgcttaggaaagaatctagaatgtctatcaggtttcatgcttaagggataaagtagatggcagttttattacttgttttctgtattatttttatttcataaaaccagcttagagaagttgcatagaaaaaataatgtagtcctgtttattttaatatttgaaaagaacatatttcagagtagaatctatatagtacctccctcttggacttccaatgataccagtgatagcctcaatataagccagtcttacaaaatgcacccagcgtgaattcttaggtattgttaaaagaagttggccaggcgcggtggctcacgcctgtaatcccagcactttgggaggccgaggcaggtggatcacctgaggtcaggagtttgagaccagcccggccaacatggtgaaaccctgtctctattaaaaatacaaaaaaaaaaaattagctgggcatgatggcacgtgcctgtagttcctgctactcgggaggctgagacaggaggatagcttgaacccgggaggcggaggttgcagtgagcggagattgcaccattgcactccagcctgggttacaagagcaaaactccatcaaaaaaaaaaaagaaagaaaaagaagaagtttctaatacacttatcttcccttgggttcactcagaagacccttggaaaaggttttaagagcaagtgatttatttggggggtaaattaatcagtagaagagtggaaaaatgagacaggtgaggcaaggcagccagtaaagagtggtgcattatcaagccagctgctgttgtgggtcactggagctttatcccttgggaaactctggaacccttgtaaaatacatgcctcagagttatttcccctagcatcaagggagctagtgtaacaatatcccaattcctacaattagtcattatatacaggctgcctctgggagctggaggggaggcatcagttgcctggtatgtctagcctgtcacatggatggcaaagcaaactcctgtggcaacagaaagccttcaggcaatgaaatgctggcactgggaaatcaggctgatgggtgctgaagtggcaaggatgaggggatatggatattctgctgtagtgcttttctaacagatgattcatatttggttctagggatcaagaattgagttaaaattttatatatatgttgatgttctatgtcaccttcaggaaaataatttaacagaaactaatatttgccatcaaaaaagcaaagaatcctgttgttcatcatcctagccataacacaatgaataattttttaaataagcaacataaatgtgagataacgtttggaagttacatttaaaatgtctcctccagactagcatttactactatatatttatttttccttttattctagttgaaagaattcagaatcagtgggatgaagtacaagaacaccttcagaaccggaggcaacagttgaatgaaatgttaaaggattcaacacaatggctggaagctaaggaagaagctgagcaggtcttaggacaggccagagccaagcttgagtcatggaaggagggtccctatacagtagatgcaatccaaaagaaaatcacagaaaccaaggttagtatcaaagatacctttttaaaataaaatactggttacatttgataaaattataccatagattgtaatttaatgatgtttaatgtaaagttattaacagaaaatcacgttaaagctgaaatgaacagtagactttgtatatttattttcttagagacagagtctcactgtcacccaggctaaagtgcagtggcacaatcatagctcactgagccttgaactctggggctcaagcagtcctcctgcctcagcctccctagtagctgggactactagccaggcgtgtaccaccacgcctggctaattttttaaaaatttttgttttctgtagagatgggttcttgaactcttggcctcaagcaattctccttccttggcctcccaaagcactaggattacaggcatgagttagcatgcctagccagtagacttttgagtcaaggtagagaatagaggaaaattgacagctaatgtcaatgttaaagttaattttgtttagtaatctggatatagttggctggttttctgttgcaccatctttaagatcacttcaaaattggtatacgtatttatgtagttgcatgaagtcaaccattcgggcttaattccttcctagaaaaagtaacaggtctactctttcatatcttatttggaggccctggatcaagaaatgggggtgagtgggtatcaggattggggaggaataaggagtactctcactttctccccccattctcttacctccagcccagctcattcttctcttctttctctttcctctgaaatttcctcaaatatctgtctgcttagtagtctataattcctcaggataaaagaaaaaggaaaaggaagaaaattgcttaataactatgttttatcaagcagcatgcatagtgctttgcatgcgtttaatcccttcaaacttagtatttactagtcagtttgaaaagcccttaaatgttaaacaatggttaagctttagggtattttgagcagggaagtaacatggtaggaggttgatcagattgggcacttgatcaaaaccctctatagatattttatctgacagaaaaggccttttgctaaaccagtatctgattctcaaattggttatgtcatctaagaaggaaaccgtatcattttcttggatgaaatggcttccatttccaaattagtcaggttaggctatgctaagctatagtaagaaatgaactctgaaatctcaatagcttaacacaataaagactgctttcttggttatatcatagtccagtagaggttgacaagccattcttaggagctgtcccccaacatggtcacttggaaacccagacttttccaattttgtgacacttgtcattttcaacacactgccaaaagccactgcagaaaaggaagacagaatgtggtcagtcaatccatggtgttttatggccaggcctggaaattatgtatatcacttccaccacatcccatcacacagaacttgttctcgattgaatttcaggaagagttaatggaattagtgagcttttagccaatctctgtcatagccattttatcgaagggacctgagctgctatgaggacaaggttttagtttatatgatgaggatgttagaaagccacatagaattttacagtcttatcattagctctgttggagtcaaaatctaggtgaataaaaattctttcaagagacacatgttaccactaatggttttttcaatggatgagcatagatgaattaggaatctccaatggtcattttcctaattcctggtctgactatgtaatatatagaatcatgtggttattcttgaaagctctagtcatattcgtgaggtagtcagcatgttatgctacttctttttcttctctataagtttcggatactatgaatctattggatcacaaaccaaagtagttaactggtaagaaggtataagcagaaaatacgaagtttggactggatccttgagttagatgagaagaaggagagatgagaggcatacagtgatagatttgactagggcaagaggactctggtagttagcaaatgagaaataaatttaacctaagaaaatcctaaagtgatggtaagaatggttagggtttaattgctcttagaagagcaagtagctttaaataagagacaaaaatatctgcagaaggaaatatgaaagtagaaaacaaaacaattgcattgtcaaaacatgtaagatgttttaatcacctaaaataaaaccagaattgtattataattgctatcctttgtcaaacttttgaaattaaaaaaaaaaaacgctttggaatggtctaaaactacatcataaaaatggctcagccactatctatagagattgacattttttgtttgtgctctgtgtttaggaatttaatgatgtgtattgctgcagattcaatgtaagttcccgatacagataaagatggccaaagctgtaattttttcatccatttcttgaatgatgtatgctaaaattaaagtaatcctaatgttaataataacttttagtgaatgcttgctgtgtgtcaaaaagtatgctagtcactttatatatattggtttatttcatcctttcaaaaacactctttgaaaagtactcttattattcttagtttgcagagaagaaaactgaaggctagagaagttcagaatcttcttttgaaagtagtagagttgtgatgcgaatgcatagcaattactcttgtagatgacctcacaggcttcctcttccaattgtctacgtggctaaaacaaagcaagaaaaccccataagaatctgaaaaagactcatgtaattattaattgacaaataagattatattacattactgataaaccaacaggtagaaaatgaaagcaatgaaatagtatactgcgaaaaaaaatttcatattatattctttgatgaaaaaataaaacaataattgcaaactgcatttcatttttaatgaaacgacaatgtttaattcttctaaaaggtagggagcaaataaaatggttatctggtctttacatcgaatgtgtcatcactactaagtgatattagctggcttattacttaaaattttcttttaggaaaaaagtgtgaaaatagacaggaggagacattaaatggctaaagcaacacccccttgctccgtaagttctttctgagtctgtgtgcctaagattaacaagagagcctgtgagcctcacaaggcaatcacaaagctatgtctacagccttggagagctgtgattacagcagccagcctcctttgcagcacctcagtgatgactacactaactctcactactgagcaacaatgaaatgtttcaaacccaaccaccaacactgttataactcttaaaatttgagccagtcaccatacctgaacgtaaaaagaaaattaccaaaaatgcttgataccaaaaagcaattaatgattcataattgctaatctttattgacagtctcttctagttcttatctacatatattttaattgtctacataatgtaaattaaattttaaattctgatttgtaaacttaatattgcataaatatttatcaatgttgttaaacatcttttaataattattttaacttctttatattatttcattaatttccatctttatgtccttgctggtctgacatttagaaaaaactcctccttttatttagaaaaaaagaatggtgaggccgggcgcggtggctcatacctgtaatcccagcactttgggaggccgaggcaggcagatcacgagatcaggagtttgagaccggcctgaccaacatggtgaaaccctgtctctactaaaaatacaaaaactagcctggcgtggtgctgcatgcctgtagtcccagctacttgggaggctgaggcaggggaatcgcttgaacccgggaggcggaggttgcagtgagccaagatcacgccactgcactccagcctgggtgacagagcaagactctgtctcaaaaatacataaataaggagaataaatggggacaataacaacctattcacagaacagaaataaaaccggagatgtcatgtggaaaaagcttatcttgaaagcgtggtcagagtggaaagaaacagcaacaggagagtcttgatttggtgaaaaaacagaatgcagatggcatagagtatcaacaattaattagcaggccatcaagagacggccataacatattggtaattgttttctttcacccttaattttttctaaaacaaaaacatgaagttagaaagtagttaattttgttagccacatggcttcatggtttaattttatcttctctatgggcctggtacaacaataaagttcttttgagatagaaagacagatgttaggcaaaaacatacaagattttcattctaatcaaaatctttgccaataggctatgacagaatcctatgagagatgatgccatttagaactttcacaagaggcaaaaatagtatgccattggcacctaaaactgccaacagtgatcatcataggatttatttcatttggcggattcttggttgagttcataacctgttccctaggcttttaagattggtccaaacttggcaatggattctttggaaaaattatttcttgatcgttttaaactttcttttccagtgtcaagagagattttcccaggctccgagttttcatttattttttcccctgtcagtttttgaaagagaaatcccctttttgtcggctttgtgattgcttttgtgtcaaattcagcgtaaaagcttttcaaacgtgacagcattagctgttttgtgcttggctgagctaagagtacatgaattcaatagagaagtgaaatcttgtttgagcctggctgatttggctatataatattgaaaactatctgaagcaagaaattcaatacttttcaaattattgaataaacatttctaaggctgcaaaatctctgtgtttttgaaggcattctttaggaaacttgaaacacagacattctataatcacataattaattttaaaagttgaacttattgtatgtagtaactaaggcagctatttgagtgtctcaaattattttactaaaaagggagacatttttcaaatatggaagtagtgccttacatttttagttatctgtggaaggatcgatggcatcatatatctcatccaccataaaaatatgtacggtagtggaaactgaatttttcttttatatattttgtgtattttttggagttgtacaaaattaaatcagcaaattgacccacactagtagtttgaggtttgggtttctggtacaataatgaaaagcattattagaaatcttcttgccaggacctaccatttcttcatgtattttctttattcccttttgttctcccctaaagcttctatgtgattaaagagaaaagatcaataacccaatagtacttttccttctaaagtatgcatgaaactcttaaagttctcaaagcatacaaacagagtgctctctacattgctgatagaacacaggtagtaatgggctagtttccccaggtaactattatattatataaatatttaatgcagagtcaccaagccttgaataactttatgctttgattgtaccatattttctctagtttgcttttcacaatttaacttatcccgtgcttgaaaatataatgtggtaactgtgtaaatctgctcctcaaaaaattttcgaaatcatcttttcttttttcttttctttctttttttcctttttttgagatggagtctcactctgtcacccaggctggagtgcagtggcatgatcttggcttagtgcaacctccacctcctgtgatcaagtgagtctctcagcatcccaagtagatggaactacaggcacattccaccacgcccaactatttctcgtgtttttagtagagacagggtttcactatgttggccaggctggtctcaaactcctgacctcgagtgttccgcccacttcagcctcccaaagtgctgggatacaggcgtgagccaacatgcctggccccacatcgccttttctgaaccctgggaattaaccaaaggctggcaacaatttttgaaatgctgactctcaataaaaatggcaaagtttgaggttttttaagttggcctttcccgtcactttctcccagctccacagtagccttgaaaatcagtagccttgcaaccataatagctgtgaaaactagcagccttttagccaccagagagtgtagaccaggattggaattcttcaaaaaggccaattttattccaagaaccttgccactgtttgacctatcttgcagctccctggaataaacctatatacatggccttgcctttatttggcccgacttagagataactttctaggaaaagccctagctccagggtgttggtccaaaccaattagcagcaattctttaacataacaggttcctaaggctgtgatgctagttgagataaacataggtctggagaaaaacttccagtgaagctctggagaatgaggtgtccataggggattttggcaacctctgacatgttcttgcgggatctagaagcccatgtgcttgtcttaacaaatagagagtatcaataaagagatagaaattgtaaataagaactcagtggaatatctggagttggaaagcacaataactaaaattaaattttcacttgacgtcagattcaagctgcaaaagaaagaatcagcaaacttgaaaataggtaaatgggataatccaatccaaagaaaagaaagaaaaaatattaaggaaatacagaaagcaaaaactgactgaactgaaagaagaattaggtaattcaacaaaaatagttggagacttcaacatctcacttttaataacaggtaaaagaactaggcaaattaacaaggaaatagacacttgaaaaagactataaagactataaacttacaagacctaacagatatctatacagcgtttcatccaataatagcagaatactcattcttttcaactgtacacgaaatattctctagggtaggccatatgctaggtcataaaataagtctcactacattcaaagggattaaaatcatacaatgcagattttatgaccataatggagtacaattaaaaatcagtaacagatgtaaatttgggagttcataaatatgagaaaattatacaacacactcttaaatagccaatgggacaaagaagaaataagaaaatacaaaaatatcttgagataaatggaaataaaaatacaatataccaaaacttatgggaggaggctgaagcagtgcttagagtaaaatgtataactataaatacctatatttaaaaaggaaaaagatctgaaatcagtagcctaagcttctaccttaagaaactagaaaaagaagagaaaagtaaatctacagtaagcagcaggaagtaataacaattagtgtgaaaaaaatcagatagaggaagaaaatataatagaaaaaatcaacaaaaccaaaatctagaaatttagttatttgaaaaggtcaacaaaattgacaaagttttagctgattggttaggaaagaaatggtcaaattactaatattagagaaaaagagggtgcattactaccaacattacagaaataaaaagaagtaaaagaggatattatgaacaactaaacaaatagataacctggatagacctataacaagaaattgaattggtattaaaaacttctcccaatgaaaggctcaggcccagaagtcttcccccgatgaattctaccaaacatataaacaactcttccaaaaaatagaagagaaaggaacacttcctaaccagacaaagatatcacaagaaaacaagctacagagcaatatgccttatgaatatagacttgaaacgcctcaaaaaattatcaaacctaatacaacaacatattaacatgattgctaccataaccaggtaagatttatcacaggaatgtaaggttggtttaacatccaaaatttaatcaatgtattataccatatcaatagaataaaggacaaaaatcgtatggtcatcacaataaatatagaaaattcatgtgacaaagtacaaaaccctttcaagcttgaaaaataaagaacacttaacaaatgaagaatagaaggtattggccaggtgtggtggctcacgcctgtaatcccagcactttgggaggccgaggcagttggatcacgaggtcaggagattgagaccatcctggctaacacggtaaaaccccgtctctgctaaaaatacaaaaaattagctgggcacggtggcgggcgcctgtagtcccagctactcaggaggctgaggcaggagaatggcgcgaaccctggaggcagagtttgcagtgagccgagacagcagcactgcagtccggcctgggcgaaagagcgagactccgtctaaaaaaaaaaaaaaaaagaaggttttgtggattgaatagtgtcccccgctcccaaaagacatactaaaagcctgagcccaggtatctgcaaatgtgaccttatgtagaaatagagtctttgcagatgcagtcaagttaagatggtatttttataagaagaggaaaagaggcatacacagagagaagaatgccacataaaggcactgaccacgggaaaaacaccatgtgatgttacagttagagattaaagtgctacagttgcaagacaagtaaaactaatgattaacggccatcattagaagcaaggaagaggcaaggaaaaattctcccctacaggtttcagcaggagtatgggcctgctggaatcttgattttggatctagcctccagaagtctgagacaatgagttttgtctacccagctacgcaaattgtgacacttaattacagaagcccgaggaaacgaatacagaagaggatttcctcaacctgataaaaggcagctacaaaaattccacagctaatgttattgtgaaacactgaatgctttcccctaagatcaggaaatagtgaaggatgcctggtctcaccacttctattcagtattgtactggaagttcaggccagggaaattaggcaagaaaaataaataaaagacatccagattagaaaggaataagtaaaattatctctacttgcagacaacatgaccttgtaattagaaaattttgaagaatctatgaaaaaatattagaaataataaaataattcagcaaatttgtaggatacaagatcaatatacaaaatgaattattttatacattaaaaatgaataatctaaaagtgaaattaagaaaatatttacaatggcatcaaaaaatgttaaaaacttaggaataaaagagatgcaaggcttgtatactgaagaatacaaagcagtgttgaaagaaattaaagataaaaaaatagaaaaatatcacatgttctcagatcaaaagacttaatattattaagatatcaatatccccccaattgatctacagactctatggaatcattatcaaaatcacaactggcttttttttttttttcagaaattgacaagtggatcctaccatttctattgaaatgcaagggatgtagaatagtcaaaacaaccttgaaaaaagaacaacattggaggagttaactttccaatttcaaaaactactacaaagctacaattattaagtcaatgtggtactagaatgtgaatagacatatagatcaatgaaatagaattgaaagttcaaaagtaaacctttgcatttatggtcaactgatttttgacaagggtaccaagagaattcaatggaaaaagaatagtctttcacaacctggtgctagaataactggatatacacatgaaaaataatgaaatttggccccacctcacaccatacacaaaaattagcttaaatgtatcataaaagaaaacaaataatctgattaaaatgggcaaaacacttaaacatttctcaaaagaagatgtacaaatagctaacgggtttgtgaaaaatgctcaacatcactaatcattggggaaatgcatattacaatcgcagtgagatgtcaccttacacctgttagaatggctgttataaaaagagaagaatgataacaagtgttgatcaaggatatggaaaaaaggtaacacttgtatatcattggtgggaatgtatattagtacaaccattatggagaacagtatggtagctcctcaaaaaactgaaaacagaattaccataggatccagcaatcccacttccgggtatatatccaaaagaatttaaaccagtatgtcaaagagatatcttcactcctgtgtttattgcagcattagtcacaaaagccatgatatggaatcaacctaagtttccatcagtggatgaatggataaagaaaatgtggtacatatacacaatggagtattattcagccttaaataaagaatatccttttgtttatgacagcgtggatgaacctggaggacattatactaaatgaaataagccaggcacagaaagtcaaatactgcgtgatctcacttatgtgtggaatctaaaaaagtcaaactcattgaagtagagagtagaatggtggttaccagaggctgtggatttaggggtggaaaatggggagatgttgatcaaaaggggttaaaaactttagtcaggaggaataagtttttgagactttatgacacaacctggtgaccatagttaataatattatattgtatatttcaaaattgctaaaataacagattttaaatgttcttgctataaaatatgataaatatatgcagtgatagatacgttaaattgctcgatataatcattccacagtgtatacatatatcagaacatacatgtaccccataaatgtatataattatttgtcaaagcaaaataaaattaaaaataaaatgttttaaaacttttgtaaaataaactttataataataatatatttttaatgaatcatagagctaaatatattaataagaactaaaactttaaaactcttctaagaaaatgtaggaatacaatggattatgcagtgttttcttagatatgacaccaaaagcaaaagtaaccgaaaaatacacaatttggactttaacaaaattaaaacttttgtactgcaagcaatattgtaaagaaagggaaaagacaatcctcagaatgggtaaaaatatttgtaaatcatatatttgataagatacttgtatcaagaatatataaaaactcataattcaacaacaaaaaggataaatgacttaattacaagtgaagaaacagtttgaataggcatttctccaaagtagatgtatagatctccataagcacatgaaaagatggttaacatcattgattgtttaaaaaatgcaaatgaaaaccacaaggagatagtactttttacccactaggatggctaatacaaaaaatacagacaataacaagtgttgagaagatgaagaatgcttggaattttcacattactggtggaaatgtaaaatggtgaaacaactttgaaaacagtttggaagttcctggaaatatttttttaatttttaatttttgtgggtacacagtaggtatatatatttatgggatacaggaaatattttgatataggcatacaatgtgtaacagtcacattggggtacctggcctatccctcacctcaagcaattatcttttctgttacaaacgacaatctaataataatcagttatttttaaattcacaataaattttttgactgtagtcatcctcttgtgctatcaaatactagatcttattcattctatcaaactatatttttgtattataaatttcactacccattagccatccccccctttccccctaccactacccttcccagtctcctggaaatattaaacatgaagctaccatatgacaaaaccattctactcccaggtgtatgctgaacagaaataaaaatacatatgtacacagaaaacctttatacagatgttcatagcagcattatttataatagccaaaaagtagaaccaacccaaatgtccatcagctaatgaataaattttaaaatgtcctctacatccaaaaatggaatattatttagcaataaaaagaaatgaaatactgatatgcactgtaacatgagtgaacctcaaaaatatgctaagtgatggaatccagtcacaaaagaccccaaattgtatcaatacattcatataaaacatccagtaaagactgaaggaggaggagaatagacaatagaaagggactgttaattggtatgggtttcattgggggcaaataaaatgttctcaaattagatcataataatggttgcacaaccctgaatacattaagaaccagaaaattatgcactttaagtgggagaattttatggtatgttaaaaagtatatctgcatgtcattgactacagatcttttcttattttttcaagttttatgaacacagttttagaaacatagtctccatttttctctttcatgaagctgcttgccagctatagaaatgaaaaaatagccatgtctgtggaacataactgctacctagatgggagcctccatcacacaatggatagggagctattttcttttatggtcaagataggcaggttctgtcctatagaatatattctgagatgttacctgtagttcagaaaaacagggatattgttgttctaaacatttcctcaacatttatgtggcttcctatttattaataagagaacctgttctttatgtgtcattatactagtttattctagccctggtcctggtccaggactgtctggaggtattagaattgccctactctatgtgaaataaggtcatatctgaataggtatgtcagtcagcataggctaagctacagtaataagcaacctcaaatctagaggcttaatagtctatattttactcatgttacatgttcgttgtagactgatgagagcattctacttagcttagtcactcggggaccatggctgatggtatctccatcttggtacattctttcatgatcatagaggcaaggaacatggttcttgagccttctgcctggaagtgaccagtagacaaaaccagtcacatggccattcctgagttcaatgggaatgccgatgtataatcttctggcgtgaaaaggcactggatatttgagaacaataatgcagtctaccacaatatgctcatggggtctgaaaaggagctgaaaaaacgccattttctggggttctgtcctctggcattgtttctggaatcgtttccacccatccatttctacaccctctcaactgacttttctcagatgcctggggtagctgggtgatttgttaattacagtattgcttaagccttttaataaagtcagcaaattaaagagagagcccagataaagagaatgctttcaaaaatgtcataatgaaattaaggtaacgaagcacttggagacctctcctcccttctttttgtatgaaacttattccaaagcagctggaagagaaatggggcctgaaagtaaagaggggaaaaatatattgtatgccattagtttaattataaaaattcattacatgaagccatgtaagacagaaaataatggaactctaatgggttggccgataacacatttactagtctgctctcagcttgtagtcattgttgaaaggacagaaaagtaacgacgttggtatgtagtcttcaaagctattgtaaagattaatcattttcagtaagccggaaaatgagggccattttcttaaatagtatgccctgtatagagtgttaccttctgaaacagagttgtttggtaatgtcagaggtttaatagatgagtcttgaagttaatggtgagaggctttacttttgaaatggctttcttacagctattttaacatttctattataaatccataaagaggttttataggtcgttttaattcacacaaggagggaagaaattgtgcttctcttttcccaataaggatttatagaacattaattcattcttgggaccaaattgtttagtgattttcaaaaataaactatgtatttttctgctgtctttttttcagaaatgccttactttattatacataataattttccagtcatgctataatcatcaagattgttttatattcttcaaagctcagttaaaataaacccagtccttttccttaaatttctttatatggatgcataacttctttaactgaattgaaatgaaacctgaattgagagtccagaaacctgcatttttatgatgactctttcactgactagctatgtcaccttgaacaagtcacttaacctttcagagcatttatattctcatgtggacaattatggaattgctcaaaaaggaagaagatatcaaaagatgaaagtgaatatgtaggtaggggtcatatattcgagggccttgtaatccaaagagagaggttaggactttgtcttgcaggtaatagcaaaccattgaaaggttttacacagaggagaaatgaggttctatttgcattacaaaaagatcatttacgcagttgtatgtaggtggaagggtggtttgagagtggagggagggagccaataaaaaagattattttagtacctgagcaagagatgatagggacgtaaattaaggtagtgtcaatggaagtagaagatttggataaaagttaaaaaaaaaaaaaaaaaaacttatgatacaactacccagggagtatgttccctgcctcctgctccagttgaggaccaacatatcagattgatccagagacagaattttggagaacattaatatttaaaggacaggcaaaaaaaaaaaaaaaaaagcttgaacactcagagaatacagaggcgaccaaaagagtggaagccaagaaagcagagaacttcgagaagagaatagtcagcagcaccagttgctgcaaataaatcaagtaaataagaacttaaatctttccataggcattggcttttggtaactgaatcagttaactattttcacaaatgtgagtggcatatagcaataagcccatattgcctttcatgaattttcagcttgggtggggtggcacttcttcatgttgcaggttgattggggtcgctctgctccatatgtcactcattctcctcctgagatgagtaggctagtccagagcatgtttgtcttaaggtaatggtgaagtgcaaaagggatagccacactgcataaatacatttcaagcctctgcttgtgttacttctagtaatatcccactgggattaggcaaagcaaggcgcatgaccaagctcaatgtcaagggcatgctgtctttcgtaggaagaatttcagagttacttagcaaagggcatggatacagggagaggtaaagaattggggccagtaattcaatttgccatagtgacttctgtcagaatagttttagtggaacgatgatggcagaagcctgattttcatgaattggagagtggcacgaatgtagtcaagttgagataatgagtgaatatctgccttctaaagagtgtgactgtgaaaggaaagaaaatgatagagtgcagattattgttgttgttgttgtttaaagatgagagagacactcatgtttgaagtctctagagaaggtccccgcagagaggcaagaagttggaacacacaaagagagagggagtatgtggaggaggatcccagaatagatgggtgcccagatggtgaaatcaacttccaatagcagaaaagtcgcctcttcctctgagactagagagaaggatgcaagatgtaaagtctgatatttcatgaaatgtatgtttgatatattaaatttccccctgtggaattgtaggtaggatcatttactgtgagatttctttcagttcgtgttgtcaggaattagtctgtaaaccacattcgatatttcaaacagaggaaattcaatacagaggactggctcctccataggaatgaaggagctgacaaacccaacagaggacagtgaggcaacccagagtttagcaacttcaggaaactattaccacctcaagggctggggaaccgacaagttttaccaaagcccagaaaccagaaccatcgggtgctaattcacccaatgtaaggtctgcacagcaggtaatggaattacagagggagcagccgtccagtgggaaacggagacaaaggagatactgccaagacagagagagaagggggataattatcttgtttcaccctttctcatgctcttctgtctcccactagtgtgtctcatgacttaacctagttagaagccagctagcaagaaatcccaggaaattctgacctcctatgggagttagtacatctcaatactgagtggagtaggaaatgggtagagaatggatctaagagcaaacgacctcttggtggttagctaacagagttaaatttttccatgaatcccttggttcatgaatgtaaatacaggatccaaggaaaaataacaaatccaacatgtagaactttttgttcataagcatattaggatcctgttttacaattttccgagcaattgcttgattttgacacttcaggacaagccggaggcatggtcagagcaagtaaccccatcctagtttacagatgacaaaactgggacttacaaggttaatgacttccttaagatcaaactgcagaacaatggacaagcaaaacttcctgggaagatgtcctttcgttactctgcactgcctttcttgaagttcctttgagacacagtcattaaaaatttaagtaatagttcacccggaacaaacatttattttacttgtaggtgaatatcacaaaacacattttaaaaggaaatttaaccaatattcaaccttaaaattttaatgatagagctatgcacttgcttttatcttccaagttaaagggagaattttagagttgcagcatttctagacaatgtccataaaacagcgagctacttgctttgcattcagaaggggctcacactgtggggaatatagtttgactcattaaaattagtagtagatgtgctagcagtagtaatgatgatgatgatgctgatgctgatgatgattaatatttatttaatccttcgggcacgccaggcacctttgtaaatgttctccctgaattctctaagttaacccacctaatcatatttccacataaatactgttaatattcccatttagcaaaggaggaaactgaggcacagaaaagataattaactctcccatttgccactaagcgatcacgccaggattcaaacccagcaggctcattgtattgctcaggcttttagctactctttctcttcctcctctcttttctaccatgtagggtcaatatcactaaaataagttcttacacataaaagaaatgagagaagacaaacaattaaagtagaaaaaaatactcaaaattcttgaaattaattcaggttgtctcatagtccacaatcactttttctacctaagatactgtgaatatatatcaagcacatagtgcagtagcagcataatgggtttgaatgtgaaacatttctttcctggttggggaaacaatcttttggggatttagcattttatattcttcatagaaaacacacacacatacacacacacacacatacacacacacacatatacaaaggcaatctttttttataagctagtgctcacagtattttaaatttcttcacacaccatgatcaccacacaagcaattccctgtggtgtacaccattgtcaatggaattcagaaagagaaaagggtgtgtgtgaagtctgttgtatttttgaatttacactccttctgaggtctggagttatcccagtagtaaatttcacagcagtaggcaaagctggtcaaggtcatggttcctagtgtgaatgacacttgggtaaaacccaaggtgggcgggcagaatattaccgtaggagaaagggaaaacattctgtgtggggaatgtctttaagaagggagaaaaaaaaaaaaggctacctttgagaacctttgtgtttatataagggcctgagccccctcaatgtcagtcaaggtcagtgggagttttactttttaatcctacatcctcacaaaacctgggcagtattcagtgagggttagcactcagtcaagatttccttaggtataacagtcctaactttcgctgtgaatacaattttgcagaaaaatatatggcacgcgtatttctacctttcaagcattaaagtacatcaaaaagttctggtttgacgtcaagcctcactctttactaccttgtttagtaggaaatctgtcatttaactctagcttactatttctttcagagattttggaaaattctaggatatgttataatttataattttaggcatttttatgatctattgattatgtttttagattcattggcaccttctgcattttatgttttttaattttaacagctttattgaagtgtaattgatatacaaaaactgcataaaattatatgggctagaacatgtgcatatacccatgaaaccatccaaatggtataacctcttatatctagacttttcaaacaggaacctatgagtgatgggtggcttccaaggttatttaacttgcttgagtaaaataaatgattttaattatatatttactaaaaattttgtttttattttgtattcctgagcttttacatatatgctctgatactggtccatcataagtattttattaacaattcagtgttttataaaaggaattcatttgaaaaaaaggtaaccaagttattggtctcagttttgtggatgttcatgctattaattagcaatttaatagatgagagataataagctcttcttttaaaatgcaaatagcaccctctggatactaagggccaattacatgttctttcgtatcttggaatacatttcttttatcactttaggtttggcttaagtgaggaggagaaagaaagaagtggtaattttgtaccctaggatatttctagaaaaggcaagcctttggcagaagttccctcagaagggctttcaaatagtgcgaggatctgaaaagtggagaatagaaactgtaatgcttgataaaaggagtatggaagaaaaggcaggcattccacgcggataaatgttaattgttttgtaatagcagcaactatgctctgtgcctttagacactgtcctctgctttcatagcaaaagtcagtgatattggcattagcttcttgataatagtttggtaatctgggtctatttgctatatgcagtaaatactattacttggtttgattctaggatgttttagttaactgagaaattacattatatatagattgtatatgttcaataggagttcaccaaacacgctgaaattatgctaagaacactgtttgatttttattctgtaaatatcatactaacgcaaaagaacaaatattaaaacaaaaatgatttttctcctcagaagcattattttcaatttcttccatttcgtgttcagctcatgattatgtattcttagagataaacacagtgtagttaaaaattgtgttctgttttttacacaagaaaattgtgctctttttacagtgattactgtgcacatttgctacatattggaccattggaatgatgtattatgttcttttaatgtccctgcattaaacatcgacattgtttctctttttttttttttttttttttttttttttccgagatggagtctcactctgtcgcccaggctggagtgcagtggcgtgatcttggctcactgcaacttccatctcctgggttcaagcaattctctgcctcagcctcccgagtagctgggattacaggagcctaccagcacacccggctaatttttatatttttagtagagacggtgtttcaccatcttggccagactggtcttgaactcctgacctcgtgatccacccgccttggcctccctaagtgctgggattacaggcatgagccaccgcacccggcctgtttctcatttttttactgctttggttaatgaagattttaagtcatatagtatattgatcttcttttgaagattttatcaggataaagtaccaaaagtgagattattgagtcaatgggaataagcatttgtatgtcacttggtatctattgccaaattgtcctaatagataacggtccccagcagtaatacgtgaatgtgctagttttactggtcttttcagctttggattttattttttgttaatttaattggtgtccaattgtaccttttcaatttaatactctattttttattacttgaaagttaacttttttctttttaaataaaatcatcccactctttctcttgtttgaactacctgttcctattcctgtgtccatttatcaatgacttaacccatcctattgaatttgatataactatcttaacaattagtattatcttaatgcttagaagcctcctctctgcacttgcagaaatgtttaatagaaatttcaggttgatatgcttcgagataaaacctaccattaattgacttctttctttgaaatatgtttcaagtgatgagatagcaagtttgaaaacactgaattgccaaagacaaacaacgaagaaaatgtaggtgatttggtttagtaagattcttatattttgactttttttctaattttaaagtaaggtattctaaaagtattttgatccttcaaaaaattcgtgactagaataacagtactattcttttgttgttcaatattttctgtatgcaggtttagttgaacgccagtagatggcactaattacataaacaattcaacaagttaatgaagagggaaagaaatgtatgaggtttttttcgttcaaatgttgttatatgtcacatattcaacaattatatatgagcttatttttgtagtttttttctcttgtgataaaaacaattaagcccactttattgccaattaattgctactaagttgaaatacttgatactggttattgctcaagatgctgcatttgaaaagtttgtcctgaaaggtgggttaccttatactgtcatgattgactaaatcatatggtaggttaaaagcaatctaatatatgtattctgacctgaggattcagaagctgtttacgaagtattttaagacactccaactagagatttcataaaaaaaactgacattcattctctttctcataaaaatctatagcagttggccaaagacctccgccagtggcagacaaatgtagatgtggcaaatgacttggccctgaaacttctccgggattattctgcagatgataccagaaaagtccacatgataacagagaatatcaatgcctcttggagaagcattcataaaaggtatgaattacattatttctaaaactactgttggctgtaataatggggtggtgaaactggatggaccatgaggatttgtttttccaatccagctaaactggagcttgggagggttcaagacgataaataccaactaaactcacggacttggctcagacttctattttaaaaacgaggaacataagatctcatttgcccgctgtcacaaaagtagtgacataaccaagagattaaacaaaaagcaaaatactgatttatagctagaagagccatttatcagtctactttgataactctatccaaaggaatatctttctatctcatcatggcgcacactgccttacctgttatctgataaataagtcactttgggattcatgatagagttatagctgtacatggtctcatcctagtatctcactccacacacccaatgggaaaatttgtggagggcaatatgactcgtcacttcatttcccattatatatgaatggaaattaacagcgcttatagacagtatctcctcaaactaagccttgtatccttattatacctctcttgatctctagtgcttttttcactagcatttattccaatcataaataaaaatataaattatgtaactaattgttaaatatttgtcctttaaattaatctaaatgccatgagggcagagattttgtctttctcatttgatacatccccaggtcctgaaccacgtgatataatagggagctagtaaatgttttttgaatgatgactccctttgcagaatgtacaattaccttgtgcaagctgaaaaaatagcacctgtacaatatgaggaagaccacggtgaaaaataattgagttccaaaatatgacatcaattactgaaaaaataagctcggtgatttttaacaagaagtaaaagtcaccactggggccaaaacagattttgaactaagagtaggaagtcttaggagaaatgagataatgatatatggaaattaagcggccaactaaattttgaaactgagctagacattagagagtaaaaactcctgtgaagctgaatttaagctggtcaccctggggaatagagcaactctaatcctgaattccagacagtaggtgtatagatggaaaagaccatggaaaagaagattcaacctaaagttgggaagttttaattggagccctatgaaaaagaccctggtggagaaagggcaaacttgaatatggagctgatatttggaaaaattctcatagtaactactttttctcaatggcaaggcttggactttcttctcaaaatacagatcttatatgtgttcaattaaacagggacagattaggttcaggaagaattattcacatggaatcaattggtatcagagagtcaaccattagatcttagtgggaaatatctgcttctcaaagagaagtcttttggggaaagcaaattaaagtcagagattaatttgatgagtttaggtaatataaactaaggggccaagaaaaaagcttgctcatggtatgaaactagagcttgaggacactgatctagtctatctatactactctttctgacagacccctctcttcattctcatgctccttgatggcccaagccactctctcagttttttaaaaaattgttttatcaaggtctctggattcttcatgggaatgacttccagtttatattttttggcttggttccaaaaagctatcagctaaggaatgcatatacttacttcccctatgggtaaagtaaatgagaattttagaagccaactcacatttttagcctgtacagaatctgcaattcaccaagctacttctgactcatgtctataaagttcttccctgttcttttctcacttcacatgtactctttgcaagaattcatccacttgtgtagtttcagtctgttgatgactacccatctataattccagctgagaatgatcttttgagttttagacatgtagatcctgctgctttctttcgatgttaatgtcccacaggaacttcacattgaagaggtccaaagctaaactcatctttgccttcttccaatctctttctccaaatgcaacctacttctgttgtccttgtcttagtccttttcgtgcttccgtaacaaaataccacagactgggtaatttataatgaacagggatttgttggctcatagttctggaggctgcgaagtccaagatcaaggggctggaatctggtaagggccttcttgttgtgtcatgattccatgatggaaggtggaagaccaaaagagagaaaaaatggggccaaacttgtccttatatgaaactcactcccacaataatgatgctaatccgttcatgaaggcagagccttcatgtcctaatcacctcttcaaggtcacatttactactgttgcaatggcaattaaattttaccataagtttgggaagggaaaaacattaaaccatagcattctgcccccttttccccaaaattcttgttcttctcaaagacaaaatacattcatttcatccccaaagccccaaaaatcttatttcagcataaactcaaaagtgcaatctaatataaattagatatgggtgagactcaaggcacaattcatcgtgaggcaaattcccttccatctctgagcctgcaaaatcgaatcaagttcatcccctcaccccctacccttcccagcatcaggtaaccaccaatcacagaaagttttactgatagtcctgctctagatcatctttgtctatgttcactttagctatttatcctagtgttccattattggaatactaagcatgtgggaattatttatattctactgttcaaggtcctcaccaaggtctgattgcaaaaattcaaaaaattgcaaccttaggcataaatgggttaagcagtttagggtacatttataataattatttactgtgctacttcaaaaatcttattgcctctatttataaataaaaagtgttgtctctacacagtggcttgttgtaatgcatttacttgtttctgcctgattttttctatttatacattttcttttttatttttatttttattttttcacttttaagttcaggggtacatgtgcaggtttgttacataggtaaacttgtgtcatgggggtctgttgtacagattatttcatcacctaggtattaatcctggtacccgttagttgactttcctgatcctctcgctcctcccaccctccacactctaatagtccctagcatgtgttgttcccctctacgtgtccatgtgttctcatcatttagctcccacttataaatgagaacatggggtatttggttttttgttcctgtattagtttgataaggacaatggcctccagatccatctatgtccctgcaaaggacatgatctcattctttttttatggctacgtagtattccatggtatttgtgttggtctcaaaaactacaactatgacaggatggcattttcacttttgttgttatattaaactcatcttaaaaaggaaagattaataatgtcaatatttgggttatggagaaaaagtatctcatatctttgaaaaagttctgtaactatagctttttaggtaggagggattctgtggaaagttttctgattacatcatttctcacagttcaggttagacaccattttactatgaaacactaatgcattgcctgcactgagactttcagtcacatggagaaacctaggcaaaatttttgtacacttggaagaatatttaaattagtaataaaatctttagttttaaactgttgaatgttaaataagatataaaatgtacttgaaagaaatttgctttgatatcagacactgccatgttgcagtttcaagacataataaaaaagtaaactaatgtttatattttgctgtttaagtttattaatacatcagatgagtcttcaaattctacagtggcttttgatatgatcatttttacttgccattttatatagaataaatataaataggcatttatgcttaaaaggaactaatctatctatggaaaaaagagaaggctgcttctcaactaaattgtacagtttagaaacccagatctgaacatagattattgttgtgacctatgtaggaaaatatgttgttttccttatcgtagtccttacagagtccatgataacatataaagccagaaatgtgagcctctgcaagttcatttctttgtcttcaatctctgtgaatagatatgagtttgtgaataagataatattagatgtgatattacaaattattgtgagaagcctctaaggattagatttcaaggactgccatctggctgatgactttatgatgacactgtcatgagatttcatttccttatttctgttccaggatcactctttaaacaagaaataagcattaactctgaattgtctgcttgtagctgtatgagggcttccacaactgccaactagccaggtacaaactcatcaagcagaggagatggtccttgcatcagagggttaaacatgcctagaagttccttagctaagctcccagatactaaaaaatccctctaggttctaagaaagattcagcatgtacatgtgtgtacatgtatgtgtgtacatatatacatatacgtgtatatgcatatgcatgcatatacatacaaacacattttcttccataacatctcagtattctctgttctttataatactgttttgtattttaatgatcaaaattaatagttgatcatctgaaaacattttgacctgttttctccgtctttgacaaccttgaaggcacttgtaagtcactctttgcttctctattcctaggtcctttctcatcttcattgcaacaagaaaagagaaaacaattgagccctattttgtgtgtagcaaggagctactctagttaaacactagatctcttttacattctccaacatgttgttttagtaattattctactttcctttttttgggatattcaatttcttctttctttttgctcctcccctttagcaggccaacatactcaagtctccctcatcctaagagaacttttttagtatatcattttttttctatccagctgtacttgcttctgcttactatatcatttttaagcagtagttggcattactgtttcctgttctttagctactagttgtactttgacccactccagtctcacttccccagcaccaccactttatgaaaacaaggacttactaagatcatcagtgactttgtaatagctaattagtgtattttaattcgtccatcttcttgactatattttaacattgatcctgttggtcaactctgctaatcaaaactttatcctccttggttcccagaacaatattatcttgaatatctcatttctctaatcatataataattgtgaggtgcttggcacaatgcctagtgcgtagtaagaactcagtaaaatatcatctgccatcgacaccataaaaattaatttacttactcaacaaatacttttgtatgaagtttgtgctaggtaggcccagtaattggtacttggtatagagcaatgaaaagccctaccctcataaagcttatattcttggaagcagaagttggaagacagacattgacaaataaaaattaaatacatgatgtgtcagatggtcatacacacagtgtggaagaacaaagaggaaaacaagtggagagagagagggaggtggaagaggagtgctgccatgaaaatgtggtaatcaaaaaaggtcttactgaaaaggtggcatttaagcaaattctaaaagacctgaggatgtgggccatatgtataattgggggggaaaaagtagtccaggagagtcctaataagttaaaatgccccaaagcaggaatattcttggcatgttgaaggaaccttaaaagggagatcagttaggcagaaaaggatcaagcgagcaggaaggtagttgacaataaatttagaggggtaactggcatctgattatattggccttttaggcctgtggactttagcttttaatctgaatgagatgggagttattggagggttttgaatggaggagtgacatgttttgtcttatctggctcctctgttacaatagactaaacagaagtagtgagaccattaggaaactgttgtcataattcagtcaagagatgactgtggctgggatcagaatgggagaggtgaatgtggtgaggagtggttggattctactatattttgggtacagagcacaacagattttataatggaataaatttaggtgtgagagaaagagtcaagaagactcaagaatttttagcctgagcaacggaaagatggggtcatcatttactgagatggggaaggctccaggagtaacatattttgggaggaagatgtggatatgttacatttgaaatgcctattatacatctaggagatgtgtggagtagatagctggatatatgaatcttaagttatggggagtagctcaagatacaaagttgggagttgtaacaatgatcagtgcaagttctctgtcttcaatgcaattttaaatgttgatgttccattcttaattgtctctcttctttctctctgcacattttgagtagctttgtctgttggcttcagttaacattaagactcctcagtgtcaacttccatcttacactcttctcctgatctccagaactgtactttctgccacctaacctacattaccacctggatatgctacaggctgcaaaatgtgtcaagtagaatgcattatcttgcccctaaaagaaagttaaattttctgtgttttcagtgtagtgtaattgtctaacttaattgtctctaaaactggaaacctaagaattaccttctacctttctcttgatctctctttcccaatctactgacacatgtattaaactggcttccaaattctgtgaattctacttcaaaaattgctctagaaacaattccctctctttatccctattgtcacctcatcctaaagcctcttcatcctttgtagatttctgggagattgtaaccaacttttctctattctgccagttatcaagtctttacgctcatttgacattcacaacagccttggatctgtcttccttgaaatgaatcttcttgcttccctttgattccagtgctttttttttaccctcctgagacttgatgcatgatatttacatgtatgacatgtttccaaaagcattctcaaatttttctgaaagtaaaaacaaatgaaaaagtaaaacattttcctgggaagaaaagcaaatagtgttatacatttttgcttgttcatttgtttgtttatttaggagagggacaagcattagaacttcataagagtcttatatgctgtatctacaaataccgtcccttggcaatataattttagagttccttttctggaactacttaaggactgttttatgatcctcagcagactgttatattattttatagccataccttttatttgctgagtaattgtactcaataattgtttgtaattgaatgaaacaattcatcagatgttgggcactgaatggctttggattatttccaaaaatttaaaggataaagatttgctgccttcaaagctatgtacaaaaatatgatagaatgctagcgggatatttgtttaaaatacaacctttattacattggggcctgctcataatatatatgtggcacattttatttaaaatattaaagttcctggtgggacatgtccccataatcccagcactttgggaggccgaggtgggggtgggaggatcactagaggccaagagtttgagaccagcctgggcaacatagtgagataccatttctacaaaacataaaaaaaaaaaaaaaaaagccaagtttgtagtcccagctacttgggaagctgaggcaagaggatttcttgaacctaggagttcagttcaaggctgcagtgagctatgatcatgccagtgtactccagcctgggtgacgtagtgagactccatctcttaaaattaaattaaatttaaagctacaaatgaccccaaagccaccagttcaaccctctcaattttgaataccctattttaaattcctcttatgcgaaatgtaccttgtagtccattttaaggactgagaggatttggtatgttaaaaaattcaatccattatcaactcctttaggtacacttagcagtatgaaaatgtgtctttcggctcttcaggagagagtcatatgtatagttacaagacaatcccatttttatattgctgagacccaaatcttcccaactgattatgaagcataagaactcttcggaggtttaagtgagctgagattgtgccactgcactacagcctgggcgacagagcaagactttgtctcaaaaaaaaaaaaaaattctctgcattctacagtagggtaatataacatctatgatgtgaaatcttggggctccgggccagagagtgtcatgatccatatggatctaaaaggttcatagtggtaacagcctgcttcattttatgtcatctcctttcaagtaattagaatgtttctagcttgcagggattgcacacaaagggagacatttggaaccatgtcattggtgatttactggtgtggaaaattacctggtgatgtagccaagtagccattttcattctaacccagtcctacagtcctgaactgggctgaaccaacgcaccaaaatatatgcttagaaatgctcctatgtatcagttttcccaggaaaaacaatagtattatcgaaaacttaccattgtttcctaataaaaaattataggataccaacagactgttttttgttcataaatttaatattacagtatcaaatattaaagcaaatgggagaaagtttttcttatttggtttaattgaaccattaatgttagctacaatacccatcatgttacttttcaattatatttatattttcattttatttctatctgtatcattctcagaaagacttctttaaaacattcaataaaaatagaatttaggtagatttatttttagaaagttgagtttttttaataaatgaatataatcatcacttgacttaatttttttctgcacaattctagaaatcttatagttttgggatcctttggctttattcagtatgtaacagggatctgtttcctttctctaaatcattaattcaaatgatttcttatattaaaaatgtttggacatataggtattaatgagttttatgaaatctaatctttccaatttccccctaaaaagggatgtcatttaatcagttctaggttgtgatcaatagcagatttttttttttttttttttttttttttttttttttttttttttttttgcagctccctttcaccccgtagggaaacctgatatcatccttgactaattgcagcaaagagcctggctcaggtcctttgtcttataccgagtgtttatagattcttgagcccagcagaatctgaactcctggctactgctacctacttcccagcccaggccccaaaagccctatgtctgcagccccgtgcaccactgtgtgtttttgtggcatttctgaaacacagagctacttaacttgtttctaagcccagattgtgcctttttgattttctattttggtattttatctaccatttttctgtgtttggatgtttcttctatattttgaaataacttctttcctttagtacaagtgattcttattgtagaaactatcaaaaatttacaaataaagaatcattctcaacattcttagcaattccttctatcatatttttgcaaatatatttttgcctatttttattttacttactccctgtttattaacagttaaaagcattttcagatagttttattttttcatttaaaaaaatcttaccacatttttattaggaaggaaatggacaggtgtttatcttttcaataaaaaacatgggggaaataatttcttgaagtacatagtgacattcttccagccaatgttttatgctgtggtcattccgtctgtcatcagtattcatagaaagagatgaaaattatttaaattaactaggaaatcaattccccattcaaagcagtagttgtgtgtttcaaatatcttctaatagtcagtttcacacttagctttatcaaattcctaattatgatactcattacatcactctgtgtccagtcagtgtgtttatgccacagagcaattaaagcaaatcaggtgaaccaaattcaatcacctttgtagataataacctacgttgcttaaacttatggccgctcatacaattactgatggattgcctttttcttttatattgccagtattttaaatgtcctagtgaagttggggtagctgttgaacttcaactttatcacaacctcttttttaaaatgtgtaaacgaaaaaaccctccatgaaatgaccaaatacagttttcatgctgggacaaattagatgaataataatcataaattcataatgattatttatgattttatgtttttatagtgagatatgttttgttgaaatgtgttatataagtgatacttaagtttcctattaaaatagaaatgctaaaatggcattgttctctttagctgtgagtctagcttttgacctctgcttaaacggaactgttgttccatcccaaatctgcaactctgaggcctatgctcccttcactgctgtctaatggatacctatcaatttggaaggaggtttcaggcagctattcccggtaatctaatctcagctctgtccttttcaatattttcatcagtggcttggatgaagacatagataacattcttatcaaatcaatgccacaaagcagggagaaatagcaaatatagcagacaagagtatcaggagccaaaaagttttcaacaagttggactggtaggctgaatactgaaagatgtaatgtaaatgcaaggtgctacatgtgggttcaaaagaaacatgaaacaaaaaacccatctaacttagactgggctccctggaaatagactaagatagagagttgtgtgcataaggtttgttgaggagtgttcccatgagatacatgtgtaaggttgtaagataggcaagattgcacagacgaagaagtgcagtgaagcctgcagtgcgttgcggcctcatcagattttcaggggagttctggaaattgcatggccctttagagacacgctgaattgaagcaagggatctggacctttgaacccaatactagagagttaatggtcctgggtcaccccatgggaaagagcagactggagtaagattgttacctacagctgaaggcaatttccagggagggaggcagctgtgagctgttagtagtcaatattccaaccagctagggcatgaggtcttggcagagcaacagtgtacccaagaccgcagtgttacccaaagtatggtcctctgactggcagcattggtatcacctatgagctcactagaaatttaaatttgtaggtcctaccccatccaactaaatcagaatctctggggatgggacttggggaacttttaacaagctttcaggcctccaagttatttctatgcatattaaaatttgagaaccactgcctacaccaaccaaaaacattccaaatatggagataacatagagtttttagcaacaataatctccttctgtttcacttctctctttacacacacacacacacacacacacacacaacacacaacacacaatgtgatagaacagtgggaaaggaaagccaaaggggatcttaggccgaataaatttaagcatataacctagtcctaagaacgtatatttcagcttaatagagagaggaatattgttataaagctgtccaaagatggaacaggctgccttgtaaagttgtagaagtattcaggaacaggttggtgataccttggtggttgtatggtataacatcctgatcttcacatactcatcatctagagtgggagttttctttttccaaatggggttttggcagaactagttccactgtatcttaataagtaataactcaagaaagggttctatggatgaaaaaatgattaggtaatatcaagttaaatcaaagcgaacagacttctttcccataggagtaatcagacccttattacagtgcatgcttggtgaatcaacaaagtatgtgtatttatgaaagtatggggggaagggataatctatacagtatgcatcccttctaaaagtttgaccatgaaaacaatttctcaagaatcttatacaacactacagtatctggtccaatactatgcatagaacatgcactcagtaagtgtttgtaagatagatagcatagcatataggccaggccactgaagggaaatcatctcaccgtgagttacctgaatagtattctctagtgccattagctcaattcttcacgtaggcataagcctatacatttgccatgctaaccaagggaatttgtgttacgtgaattttgactctattcagacatttttttctatgactcctccaaggctgttattcttacctcatattctggtagaagtttaaggacttttttctgggaatattgattaattagctagctagctagagacagagagaggatagagattgattctctggcagagcctatttgaatcatattgaatctttttttttcctgagacttcccacaaggaggatggaggagaaattttttagaaatccaccgaagtaatcagggatatcttcagtaaaagaagctatacttaataaagtctctattttagcagatggcaatcaacaatagaggcaatagacaatagagtctattaaaattgctgggatctgctaataacgtttttcttttccctgaaacaaatgccattaaccctccttgacactctgtcttcatcaacattctaatagaatggaagtaactcataattttgaggatttttttcccacacaaaacctataaaccacaccacgctagtgattacttttagcctagttgctaggttgctgctggtaacagtaaaacttatcctgacaggtaggcaattccagaagcccagccaagcacttggtgtgtgtgagtaaacccccatacacttctcatgtagagtaaccctggccaacccataactcttagcaactattcctggtggacggacctggtctactctaagaagaggccaaggttctttaatagtgcagttgcaagaaccagaattgaaagtcaaagttctagcaagattttgcagactccttggcaaaccagtggcttgggactcattcttgacttcaagcccttaattgataatggtaggacagcttgcttgcgctgggttctgctccctgggatatgcactgtttgccaaatgagtagcaggtggacagacatctttacaatttgctgtcccatattctaaatgaacgtgacattctataggtctgagttaacctatgaagtcaccaatttcaatatcaaaatatttatgacagagaaaaggatactgaggcacagagagtctgtgactttcctaagctcaaaacaccagtttgtgttaattctgacacagaaattcttgtatttgctatcagtctcctttttctgtgtgtgtgtgtgtttttacattgcagcatcacctatatgatgttaggttctgtaactttttgagaattttctcacatacagtgatgtgttactttttgatatttcaaatagttctagtaagtcttttctacttttattagcgtattaacatactggctctaagagggcatctcaccacatctttgccattcttcctggaaaggcaagtttctctccatcttcttttttgtattccaaagttttgccaaagtttgcttttgaaaatgggttacctggcagagctttattattctaactttgaaagtacaagtcagaatcagacagtggcagttatatatgcactactgtgattactatataatgaaagtatctatggtgaaaatactgatactgacatatatttgccattttctaattaagtgcttcagtaaaaattaagcactcactctttgccagatactgcaatagatattgagcacattgaacaaaattctccatatacatatatatgagtccacattctatgaaagtataatgtttttctgagaaaaggcataatattctattaatatcagcttttgcttcttccaccatatattgaaagaattctgaatactgttataatttaatgggagaatctagagaattctgtatttgctttcactgcattgatgaactaagatttttaaaaaatgtattcttcatagaactacttttccatatttacctaatattattcttatatcatttgagcacatatttcactaacaaaacaaatgtgcaatgttattagttctaacatcaaaattacactgatactttaatttttatcctattatttttcatgcagattaaaataattatagctacatcacatgttgcaagttttaagagctactttaaaaatatatgcttcaggaaagacatgattagatggggaaatggatgatgttcatattttcaaatgaaaagttttaaaaaagtgcctatcacaaacactaaatttttacataaattatcaactactaatatatctacaagaaataccatttttccctacaaaaactcttaacaataattgttaaacttagtcctggaacctgctaatataatcggacaaatgttgtcaataagaaggtgaaaaagaaagcatatatagtttatcaaactataaaatatagtttatcaaaaccaatttttcctattgacatttattcaggaaggaaaatggatgagtgaaatgaacaatggtctctaagagaggtgggagatagcaataaattcagaccacgtttcctgtcattacagcagggaagtaaaagagctacagtcaactctcgaaagtacttgggggaactaatgattccctgtagacctgtgatgtttttgaaatttaattcaacaatttgatatacaccgcaaagcgaacagatagtcagatcaaaatcggaagaacgattgtctgaatggcatccatttttcctagatgtgctgtcccatcctgtgtcaattaaactttcaggtgatcttcaaacatatttccaagtaaaaggtattgcagttatcctataaactggcctcttccccagcactgcttttgctgtggtcaactttatttctttgggctcacaaaactgatagagcaaaataaggaaaacggaacattggattaaaataaattaattcccattctgtgactcactaaaaaaaaaatgataactatgcttctgtgagcattaataaggaaatgaataaggaaatgaccaaattgttcagtggacaacttgtatgggatttttaagtattgtgtcatcatcaatgttgtcaattagcatatactttgaaatcaactaaagcaaatcagttgactaatcattaagggtctttttaaatgacaacatctaaacagcaaatgttttattttggaaaatcatgacagcacaagaatgagccagatgttttacaacatgatatccataatttaaagtatgtagtagtcactcaaaggatttctatttcagtttccttatgatttggctaagctagaatttggaaaaacactttaaggtaatgtgagaaacagcaaaattcaacatgtggattttttcactaaagcttatttctgattattttttacaaactttactaggtatatgttaacttcatgacacttatagcagtggaccgtagttttaataaaatgtgaatgtatactcttttctcaataatattaaagaatgttgactttcgtgaggatatttttatttttctcaacattaagaactgtcaaagatttaattctacaacagaagacgtgaattttgttttctaaaggagaacagaatctatagaagaagtgttgctcatagtactcagattgttgaccaatcttaaaggagaaaccgtcaattaatttaccgagaagtaataacattatctttttcttcaattatgcacatccacaaagatttggggcaaaatccacttaaatgatattatacataatagatgagtattcatatgttgtaagagtcctggcttctttcctgcaaaatgattaaaacttggatcagaaaccaattaaaaatccattctaattcccaaatgtatgtaactgtactataagaaaaataaatatttcttcttgagggatatccattagttaaggatattcataacatggtgtcttgtaggaaatgttaatctttgggtgaatagggatgtttgggaataacaagactcaaagagatgttgcacttactcacttttctctgagttgttatttctgtcatttccccagtgcgcctgtcctcaactttgcctctctccttattcctttttttttttttttttttttgagacggagtctcgctctcttgcccaggctgtagtgcagtggtgcgatcttggctcactgcaacctctccctcctgggttcaagcaattctctgtctcagcctcccgagtggctgggattacaggcacccaccaccacgccctgctaattttttttgtatttttagtagagacagggtttcaccatcttggccaggctggtcttgaactcctgacctcgtgatccacccaccttggcctcccaaagtgctgggattacaggcgtgagccaccatggccgatccctccttatttctttttatctctacctctgcctcaatggtatttctctattactgttagcatttgctttctgtgagctcttgcacactgtcagcttatatacatgttcctgttcacatgttttcctgtccccagtggttacaacatgtcttctatctcagcccactctagaattgtcttacttttccaggtctcctgctcctcagtatttttcccacttttctagattcatgttttcccatctgcatatttctcttccatgtctgcactgtcatccgcttagaagacagcgcataaggacactgttatctgagcaaatcttcagcacagccaccatgaagcatggttaccttgtcactttccatttttcccatagtgtgtgcaaactgccctgatctgcatagaaaggtatcataattgaggaaacaaaatgcacaaaaatgtccttggttattccacccctcagaaatataggagagaagtaatttacagaattacacagaataacgctatgtcacatggacatggagttatcgggttagcatataattggaaaatatttcctaggaccttgacatttactcactttttgttttcaaattacatgtccctatctattagttgcaaattattttaatgcaccgtttaccaaagaaaggctgtttcttctgaaagctttcatttgacaagtaacttgtaaaaatattcacattgtgtatctgttttccccttctagtccaaactctagttatcttaaactttgcgcagttataaaaaatcataacaaaaaaagcttcctcgttgtcattcttgtcaaaacaggtttaccagacttaggtaaacttaaaatagttagtgtaaaagttaaaaagctgatttgctccttccagcgtgtttgttgcctttttgccacagcaaaattgtaaatgtaaacgtattccctaggagatgagctgggctgcaattttcagctaattgggagaagcagccctgagttgagcactgtcaggctgatttgagtcttaagatatgatgatgattattgtgtcaaatgtaatcaagaacgtgggctctgaactgactcaagggctggctgtttttaattcaggttcgtatatgaagtagacctccggttcaccgatagtcacagctggttgtagaagagagcaatttttaaaatgctatttcattctctatggagctctagggatcagagattggatgcacagggaggggacacatcctcattctctcctgaaaaattctattaattttcagtataataaactttctcttgagattccccagtggctctgtatcggtggttttcaaacttctcagacccaatgccacccctcttttcttttttaaataacaaatactttgtaataccttctttacgattataagccaaaatatgtagacaacataccctacttatacaggcaatagtttaaatgatgccgtaactctattttaaagagaaataagagtcatttataataaaataatatgtgttgtagtatgcagttattcaggcaggatcacactggaacacaagtgaagtttttagatcacgagactatcaatgcagtataaacaaatgcagaatgacaccattgtgttgtatggagactcaaataccatgaggggcattggtcatccatagcgtaattttccaaaatgctgaacaactcttggcaaaattcctaacaccatgaaataaattttttcttggatcgttatggcagttagttgcatggctgaaaaattcaatgtcttaaaatcatgaggaaaatatcttatgtttacgtgtaaaattgagttacgttccaggtttaggtgtttataaacagggtttccacatacatgcatgtccagtgggatattccaaagtgctgtcagacttgggagagttctttgttgtataagaagtctaccatcttcattccctctccacagaatgctattatagtaacactcttcaatcactgtgatagtcaaatgtcctccctcaatttctaggatgcctcttttttttgtggtctgtataatttggttaaatatctttccagacaaatactgatttgtgaattaatgaaatagcagtattttcggagcacctaacctatttctgagtgatacagttgccatttttacaagactaaatgaaattaccatttcagacctgccagattgtctagcccagtcttttacaattctgtgattatcactgcaattataatctattttcaccacttgaatggcatgatctctataaaagggtggtgataacactcatctattctccttcccctcacatagctatatcaatcgccccctaaccagttgttgataaatgcagttgaattttatgtaaaaattataagagatattattgtagctgtccaagacatttaaaatgctaaatgcaacttacgtggaggctataagagaaatatgaacccatttattgaagagattagctaatttagtaaaacaacacagatatacctgcatacagggataaatccctattgtctaaattattgagataaaataatgttttacaatgaaaaacttttagacaagtaggtaagtaaaatgcagcagtctatttgcatttcatctgggcatttgacaaagtctttcgttatactcttgtgaataagttggagaaatactggctagatgcaagataaattggatggcttagaagccacttcatgattttacgcaaaggatgtcgattaatagaccagtgtcaggtggtgatggaagatctctggtgctatgtcacaagcttctgttctcaaccctgacacactggatgtttttgacagaacatgagtagaactacagagaggaggcccatcaaacttatgggtgataaaaagcagggagggcaggagtattttgggtgacagaagccaaatgggtgtctggacaggatgcgttttaaggcacttttggtacttgatgtctgaagaccaggatcaaacttataggcaatctgaacatttgccaaaataacaggttaattttgacagaagttattatttgtatgctgtctatttctttaatacacctagaaagtattgaaataacattttttgcagacactcattttgaaaattcagaaaaaaaattgttaactttcgtggaagagtaacagaaactcagtcattgacagctaaatacaatgtgttgcccagtaaaatagtccaccccttcactttcatggctaatataaaatttgatgaaagatacaaattccaaagattgaatatctgtacatttgcaaagcaaaacacaattttgggcacagaattgctcattctcatttttaaacatcttggttataactgaacaatagttttttataacaaagataatattttcaaattattatgaggttcaactgaaataatttatgtgaaagcaatgtctaaactctaaaattctatataaatataaattattattcaataaattcacatcaagaaaattttaagttttttaagaacaagagcctatggccttgtttttagaagctgtataccttatcggtagtaggtttattgactttaattaaatttattgagtatctattaaattgccaggaactgtggtgtgaatctttgccctcaaataatttacagtaagttgtggttgatgaatggtgatgacgatgatgaatatccagactatagtaagtggtatattcataagtcagaggattcttaaaaccagatgcaccctcagattcattcctttcatgttgtacttctaattgaaaaaaataaatcctaaattatgactgttctttataaattttaattgatcttataaaaggccatcaatacatttcaaagtatctaggtcttttaaatgcaatttttcaccctggtaattaaaagtacgaaagcaagaaactttaaatctttattttgataagttttaattagctcaagctacttgtaatcccacatcttgtcttgtaaatcatatctgagccattaaaataggtttacaattagaagggcaattcttttagaatctacttaaactaagtcacttcgacaaattaattcatcgttcagttggttttattaaaatgtatttatttcactgtaaaatgtctagtaaagcaatgtatgaagtattttattttcatgttagaaattttatgtaaaagatatcccaaaatacatagacattcagatactctctgtatcattaaccaacatttactaacttatcatttagagaaggccaaaattgtatgtactataactttgtataatttcataagaattaaaatattcgattaatgcctgtaatgccttctttctaaatcaaatcctcaagcttacctcgagttcaaagttcagtatttattgtaacacatctcatagatgacggatgaagatggtaagcaaaggaataataatttcttttctcttttcacacatatatacacacataccccataatcctaattcatataataataacagaaaacaaagggcttttgagaatagtgacatattaatatccattatatttacttcacagggagactggcaagtctaccttgagaggtaatgtcttatagtacagtggactagattgtttcaagatttgtcatttattttggcaactcacccagcttccctgaaagttaagttcctcatctataaactgttcatgataattacaacctgcctcattagcctcatcaagctatttaaaatatgaaaggaggtgctatctgtggatcctgtcaaaggagcttgaaaactgcagaacattattttagtgtaaaatactataacaatacatgttgaatataaaatggctttttcttaacttttattttaagttcaggagcacgtgtgcaggtttgttatataggtaaactcatgtcatgggggtttgttgtaccgattattttgttacccaggtattaagcgtagtacacattagatatttttcttgatcctctccctcctcccaccctccccactccagtaggcttccacgtctgttgttcctctctgtgtccatgtgttctcatcatttagctcccactaataagtgagaacatgcagtatttggttttctgttcctgcattagtttgctaaggacaatggcctgcagctccatccatgatctctgaagaatctccacactggttttcacaatgactgaaataacatacactataaccaacagtttataagcaatgctttttctccagaacctgttatttttgactatttagtgatagccattctgactggtatgtgatggtatctccttgtggttttgatttgcatttctccaatgatcagtgatgttgagctttttttcatatgcttgttggtcgcatgtatgttttcttttaaaaagtgtctgttcatgtgctttgctaaaagggccctttcaaatgtgtattattaaccacaagagagtactgagtaagagactaggtaataaaagtcacaaatatttcgatatcataattcagaatttagatcagcggttatgaaattgttcgtatttccaaattccactgacaggactctactataagtttatttcatctgttgatatgtttttagccacttctttcttttaaagtgaatctgttgtgtgtttgccatttgatattagaaaactgaacctgcctgctttgctgtcttctgaatattatgtatcaacaactaacaagctacagttagttgttttgttctgtttttctctaagttattgtggatgaggatatatataactgcacagtcttatcaggtttgtaagagatgatcttaggctcatcttttaaattggtttttatactattttaaacaaatccttttaggagagaagaaaagctgcttagtctatcaacattaggaaatatatctttaaagagtttatcactgcaagtaaccaaagccaacttaaaaattcgcattatacaaatcattgagaatttatttagaacagaaatgtgtccaactataggtcaacaccaattttaagtgtgtaattatctgggaagtagtgttaactgcatttttttctaaagatcccttacagttgtataaatgcccaaaaggatattttgagtctctgtatattaaccaaaccaaatgtaattcattactcccaacattatatttcaacctctccaaatagtaccttttcgtattgtatcagcagaaaaatataaaatgcagatcttaaagagtatcaatctctttaaaaattcaagaaagaaaaaaatatgtgtgtatagagacgtgtatttcatctgctcataacactgtgtacatttctttatcaactaatttttttcagtgatttatgagttgaaatacaaatcaaatgaaacgggtaatgcaaagtaaagtagaaaacacattttctactgctgtctcctaatgcaggtcttttcaggaaagtactaatggttttagggaaagtgtataattatggttgtttccctaatgataaattcgcaaatctctattttaaaaacattcataaggttaaaaaaatgagagatgaaatgtgtctttcaaaattccttacgtgattgataatgcctatactctcttactatctaaagtctaggtgatatgtatattttttttaaaaaataaaatgtctgtatcagtgaaggaagtttacacagatagcttcaaagctgtggtttatctttggaggattaatctatttctcatgccagtgtgttgctactgcacatgttaaaaagtcatcctgtggtgtctggggtgacaaaagatgggaatgagttttctgagaactaatcagcaatactttgggaacatttaggtcatggtttccaattaactctggagagtttgagtaatttagtaccagacctcaagagagaggggatgaaaacctcgttaattcatatgttggtgaacggcaaaccagcaaatttgcattaaaaatggatttttattttaaagcaaagagcagccagatcttttctgcaatagtttgggtaggagaatatctttgtatgtatgtgttcccttatgtgtaggtatttgtatgtttcaacgaccctgcatatggcaataacagaaaattaaatttgtgctctaaaatgaagaccaggattcagtgacataatcttccttgtgcctttctttcttttagtacaatgaatatatcagagaggagtgtattccaatatctgtcttcagagttacaaaaacttcttttctagaatgcaagacttgggctatacccccagctctgccacttaacttgtatacaaccttgggaacatcattacaattctctcagaatcaatctctccagccctaaaatgaaaccagcaaaagcctgtactgtatatctaaaaggttttttatttttatgaaaattagttaggcaaacttttgttaagcatccatcactctattttgagataaagccttgctggatgatctccacctcttttgatggaaagagtaaaacatgtttaagatacatttatcacttgtttggcaaattgagatagaagtttatgaaagcagattgatatatgttacatttgagctactgggaaggactccagatggtttatagccttaattacattgtaactctagttaaatgtttacctatctgtaccctctgttaaacttgaatatgttaaataccaaagtccatgtattattggattttctgtcaccatcatcaggcacagatcctggtacacaataggtacggaatggatgcatggatgaattattgaattagatgttggtaggcatgtggaaataagaatgaggttcagaattaaagataatctgtatcgagtgtaaagccattggcagagaatgaaatatccagctgagtatacatagaaaaagaaggtaggtagaaaaatggaaaatatcttatgaagtgatgatagaataactctgaatatgtttgaaaacatataaagagttatgtggatgttagctttaaaaattatcttccatgctgtacattagatctgccattcttcatgctgtggatgaaaagcaagcatcagaagttaaattaaaatgatgtcatatattcctcgccttacagtttcataacagaggagaaaagagaaacattctctcattgccaccacccttctccagtcatatttctaggtagatgttgcccaaaaacagataaaaccacagagttggttttgctaggaatggactactaatccaggcaatgttgacagcttttgcttctcattagtgcacgttactaatagaattgctagagattaaaaggaatcctttctacaaagtgctgtatatccataggtgacaaaattctagcttcccctcacaagtacaatataaagttatgttttaaaatcaaaatgcaatttactagcaaactagtaggaactgttatggttacaggaaatttgaatttcagattaactctggttctatgagtagcggttgatatggcaagaatcattttgatcttacatccaggtgctactaaggtctctctgacctatatctcaccaaaaaaaggaacaaaataatgatcctttaatctttctcctaaaatatcataggaaatgatagtggctaaattgcaaataaactaggaaggaaagattcagagtattttatgtgattactctataacaatgccaggccatagtgaaagtgttatttagcagaagactgagttctttgaatgttcctaatttatcacattttaaaaataacctgggcaaaataacctttcatatcagattgagcctttttctaaaaatactcaatatgtttctgtaattatacctacacacttacaattccacagtataatgcaccgataaagtatttttcatccatatatctaatagtagaatggtgtgtatacaataattaagctctttaggcttaccccggaaagcaacaagtttcccttcctttttcctttttatgtattatgttggccataagaaattgatgatattcaactcaatgcagtcttagagatttattcagaaataccatggtgtgtgtgtgtggcgggagtagggttctaatgacaggtcagaacttacttatttgatttcttcattgataatcaggtcttaaaaagaaaatgggtatgctgaaaacatgccttctgtgattctttaccttcatgtgcagttgtctctggataaacactttctttggcacgtatagggttgcactaagctttatagctccaacactccgccccttcagtagattcttgcttgtaactgatgataatgcaaacctgtattatctataggtctccttaaagggcaaccaaaagttcagtagcaattcaggcacaattactgcatgtgagaatcctccatcttgttccctttggagaccacatatatttcttaggcaagtatatttttaaaatccttgttcagcatgacaattcaggaggtcaagttctcccagaaagcagattctgagaaagtgattagcatgaaggaattttattggagagtgctctcaggattaacacctgtgagcggaggaaaggaaagggagcaggattgggcagaaggagaagctgggctaccatacagtcacaactacaacacaatcaaccctccgcctctccttcctagccttccccaggaggatctctgaagtctgaaggtagaatagcccttcagaattgtcctgagttgcagcaagggacccaggattttataccccacaactctcccatcaaccaatacgtgcagcccgtctcggggacatagtgggtaactttgggctaggcacctctctttagctgagtccagctctcagacaggaataacagctgaggactgtcagccagtagcactaccagcagctggggtcagaagtatttcagtcctgaaaaggggtccgggcagcccagcttagcatctactatgccagtcgttctcaaatctggttcctggcaactgtgattctcaagctttagcatatattggaaggcttgttaaaacacagcttgccggattttacccacagagtctctgattcagtagagctaggctgaggcctgggaatttgcatttctaataacttctcagacgttgctggtgctgctggtccatggactatgagaacactgtttcatgctgcccttatttacatactgagaatggtacacagtgctcttatgaatagaatgaaaaccttttgaaatcacattattccttactccatcaaattctcagctatttttgtgcaccataaagctggaatagctgattataaaactttgttatgtaaaaaagtacttaaccaatacagtagattctgtttgcaaagcattattacagtttctaatatctggtcattgttacttgtaaaattcagccaaattttctccagggcctgtagtttgataacttggacaaaggaatttaaaaaaaaatctaattcaagacctttggttttttttctgaacatatcttttttttctttatgattcttatttttacattttacttatcatataagccacttaaacccatatggttccggaaaatttaaaactatatgatacatttagagcatgttgaatgcacagatatggaaattaagtattcttgactcattctagactagacctggcacaattaaaatttagggattcaacgtacacacacatagattccgagagaaatgttgaagccgtaaaacccccacacaagcaggaaacaacagtcttacctattattcaagaggcacgtaaaggagctcatttgaggagattttctgctgttattgccatcgaatttttaacgtattttccaaattagaaaatattcagcctgatgttgtcaatatttcagaccacaagggtatcatttaggaaaatggtttcttactgtcctgaaagagttactgttcttccctaagggcctaatttacaaagcagcaaacttgctggtaggatttggctgaaaatcacattgtctcggtagaactctttcatctgatttatgtgcattgcattttgcaaataactcttggaaagttatttactagttactttctctggaagcagagggtaagcggcatttctagtttaaggatagaggagctaagatgcatcaagcgcagctcatcatgaagctgatgctgataaaatgcacaatattacattctctaagtttcactctgccatgggagaatttcatatttttaaattttgtttgaaattggactacattagaaaatatgtcaaatgtctaaccctgcatttatattctggaatgtgacagcttatttctgttccaaattttgcactggagatggagtaagtcttaatgcaaactgcatgaaactgccacttttataggtcacacccagtcaattgtcagcagttacacatggttcaaactgtaaggtgtatgcccaattgtagcattgagattcgtggagttgttgcagtggttctgaatttttcaagcatgatacataaaaagataaatgactcttttgatatttctccttgcattgatagtttgcctgaaaactagataagcagggagccggcagtccacgttagcccttgaactacatgaggtttaatttatttgcccaaccagaaccctacactacctttcagctgtgcagtattaaagtttatttaggagttgataaatagcttagtgcaatgcttccttttttccagtagctacatcctcataaacctattctaccctccaccagttaatgcagacagaagatttttatccagtatgagcactgaaactccactgtggaagactgtgtgctcagcaaaaacctcacccatgatgaataaacagctcttccgggggctttgctgccgctggctcggcaggagttgtttattgcctggtttgcacatcccatgataaagttgctgctgaaataaattgcagttttgcataattattgacaatcacatcttaacaagcaatgtgtatcatattcaagtgttcaattttttaaaatccatttttagcttatgtttaatcccagaaagtgtttgtgtagtaatagaaggcaaataagacatttaaatagagtactaatttcctcattgcagacaaagtttacctgaatctttttccataggactgttactgcctaaggcaattttcctttctaagctattattatatagatatttgctgagggcatatgtgtgtgtatccacaatacatgcattttatatatatatatatatatatatatatgatcaaaaatatgaatacatttttagagtttttgtcatgaaagagtttgtttcatctttttaaaatattacaggaatggggaaatgggatatgggtagaaggaactaatgtttttgagtaactgtaatgtataactgtataacgtggggcactcaacttcacaggaattttttattttaattctcatcacagcaatagatattgcagatgagaaactgagaatcagagagggaacttgccatatcacgtaagtggtaaagaacactgggaattgaactcagatctgcctagtttttaaaactctactctttttcattacacataacatttttattttggaaaatgttctcagttgtatgatcaagtagttaaatatgaaactaacacaataattataactgatgtcatgcaaaatgatagtttgcacaaaatgatagtttctatgaaatgttatttctttacttgttaagtctttcttcctttgccctccaatccccttctttttgtcttttcctctagtcttttccttttgattctaggtttgtattttcttgacttttctccttgcatatcaaatccttgttttctgcctcagagcagcatcaaagacaagcatggtacagggattttagggttttaactataaaggtttgtctcaaatttggcagtatattaaaaataagctttcaaaattgaccaacaaaaactacaaaattgaaaaaaaggtactttgaactttcacatgttcaaatatatgtatatatatttcacatatatatatgaaacctcctctgtggagaggggtttatagaaatctgtaattgtcattcttgcatgccttcccccatacaaacgcctttaagttaaataaaaatgaaagtaaatagactgcacaatattatagttgttgcttaaaggaagagctgtagcaacaactcaccccattgttggtatattacaatttagttcctccatctttctctttttatggagttcactaggtgcaccattctgatatttaataattgcatctgaacatttggtcctttgcagggtgagtgagcgagaggctgctttggaagaaactcatagattactgcaacagttccccctggacctggaaaagtttcttgcctggcttacagaagctgaaacaactgccaatgtcctacaggatgctacccgtaaggaaaggctcctagaagactccaagggagtaaaagagctgatgaaacaatggcaagtaagtcaggcatttccgctttagcactcttgtggatccaattgaacaattctcagcatttgtacttgtaactgacaagccagggacaaaacaaaatagttgcttttatacagcctgatgtatttcggtatttggacaaggaggagagaggcagagggagaaggaaacatcatttataattccacttaacaccctcgtcttagaaaaagtacatgctctgaccaggaaaacatttgcatataaaaccagagcttcggtcaaggagaaactttgctcagagaaataacttagggattggtttattaaattttaaaagttgacatttttgagtgtttatttaatattttacagggaaagcatctgtatgaattgtctgttttatttagcgttgctaactgaatcagtttcccttcattactttcaaatatgttttgaaatgttaatctggcattttgtagctttcttcctaacatgatctgtgaaaataagaatgagatggctgaatttgtcgtagttaatgatcaaacaattttcagacaattgtttttcctagaaacaaaaattatttccataaagttccatatgcataaacagtgaaaacagaacgtggggtagttttgtttaaatgaagtcttggtgagaatcatattctgtagtacaaggaggctcttaaagtttattctcaatacctgatataattttcctgaactattatggagttttgttatgtatagttggtttttctgacttgatataataactttactagtctctcaaatacaatttggatataaatcattataataagatgattgattttttagactaactttattttttgatatttttaaactattatgaaaaactattatgaaactattatgatatttttaaactattatgaaaagtatattctagtttgaataattccagaatcaaatcataataagcagaagttcttctcctctccctcctatcgttctccttctcctgtttttcttttttgatatgatagttgatctactttgctgctctgttgcatagagtacgtaacagtggcaatgtatggctcctgaatttatcgttcttgcttcatcatcctgctttgaccccactttctcctccaaaatgcgtgttgagttagtttgatcatttggaggtaatttgtttggaacagtatcagactttatagatatctcccatggcttgtgatagaatataagggcaatgcaaatgtagagttttttgctcactcttcgatgtatggttagacaatgtaccactgtaatatatttggcttaggctatttcataaataaaattttattataaaatattataaatgctgataaagctactccagaattttaatagatatgtgggtttcccggccagatgcggtggctcatgcctgtaaccccagcactttgggaggccgaggtgggtggatcacctgaagtcaggagttcgagaccagcctggccaacatggcgaaaccccatctctactaaaaatacaaaaattagctgggtatggtgacctgcgcctgtaatcctagctacttgggaggctgaggtgggagaatcgcttgaacccaggaggcagaggttgcagtgagccgaggtggcgccactgcactccagcctgggtgacaaagtgagacttcatctcaaaacaaataaataaataaataaaaatacatgggtttacattttacccatcagctatggtaggtaaataataagctttgattaagtctattttagtctatttttagcagattactttgaaaaataaagaataacccaatgactaaaaaattattttatgtcagggatttaataaaacatatctttaaatctagttgagggcaaaaatacgtctattttctactatacaatttgtatttatatctgctgtattatataatgaaaatttatctctatttctaatctcaagaaactgcaagcttctgaatcattaaagggaagattcaccatgtgtcctaactatatttactatggaagcatggaaaataaatattttatgtttagatttctgatctctctttcaaaagcagttggaaattatgctgagaaaatgtcttagcttatcccatgttactcaagaaaatgtatttattcgtttttgtccagtggcttaaccaaaccacagtttatttgttgctcacataaagtccagtgtcgatcaggctactcttttccatctttgagctaaggcacatattacacataactttcagtgtacccgaggtagaaaaagagagagcttgggaataaggcaggggctttttactgtctcaaccccaaagtgataaactacatttattctcaaaatccagataaaactcccatagagcctctgaaaacctcaacatttgcgtcttaactataataaggttaactaagattccaaaattattttaaaacagagacagtttccctcttccctggcagctaatattgtattttctataaatccacttgcccaaggtttaaactacattttatggattgaaatgacatttatagccaactcctgatttttagttagatggttggataatgatcttttgatgaaagactcggagatgtcatggtaaaacggtgaactactgaaactattgattattgttaatggcacatttcagctgattgaattgagtcaagaaactggtgttgaagagcaacaaatggaaatgccgagcttgaaaataaataaagcagcataccttaagagattacatgcaatttcagtatttcagctaaatggaagtgtttgctttttttcctctatgaatttttattttgaacaaaaggaattttctataatatgtaggtaggagaaaagtgaaatggcatgctttttcacttcatttgaagaagctggtagcattgtattcatagattcatgctgtatagcaatcatagttctcatatattaaaaaaaaaggaaatttgaaatgcctagccaaagcaacagctctgccaacagattttgatatatctgtctaccccaaaagtagtgatgatttacttcatacaaatgctagtgaatgaagagagagggtgaaaaccttcacaaaatgtgtttttctctaagactgtcaatccgtttttctatatatggagactccagctcttgctagactacctatcactttcgtctatcagccacttcgtaagatatttattctctcagcaataatcataattcatagattctttaaacatacatgtaatataaagcatatacattctgaatggaattaacatgattaattcttctctgaaagacattagaatttcctcccgtattataaaaaggtgtaactcactttccttactaaaatcaagaactttaccgtcgtccttgtacttcaggataagggggtgtttcttataaatattgttatttctgatatgctaactggaatttttaagcaaatgtatttttatagaacgccatacaaagcctttaggggtgaaagtttcaggatttttaaattgcagatttatcctttaaataaaaaaactatattcgtaattgaatcggattatttctctatccaaaacattttctgctttgggcctaagaagagttgacaaagctgttcatggttcaaagtactaccataaaaccctgggtaactaactgaaaatggaaagactctgtctttctgaatatttcacaagagtttcacaaatattaagtggttctctaagtacccctgagagatcattgtaatattagcttgtaaagacaatgtgggggtgtgggtatgtggtgacctttatgatgttcataaaggtggtgtaattaacatatttttctcagcaagacaaactaaggagcaataaatatatgagataccttcatctgtgatctgggtcatgtctcaggccatatctttcaaatcactcccttccctaatctcgtgttttacctacgtctcctctcaatccccccattataaaaattgtcttctgatgaataaaacatttccagagagacaagtttcataaagtttgaattgtacatctgagtacacctatgaattaagatatctttgatttctaatatgttattaaaattgggtgtggtggctcacgcctgtaatcccagcactttgggaggcagaggcgggcggatcacgaggtcaagagatcgagaccatcctggccacaaggtgaaacccccgtctctactaaaaatacaaaaattagccgggtgtggtggagtacgcctgtagtcccagctactcaggaggctgaggcaggagaattgcttgaacccaggaggtggaggttgcagtgagccgagatggcgccactgcactccagcctggtgaaagagcagactctgtctcaaaaaaataaattaaaataaaataaaataaaattggagaagtttctcaccaaaattttggcgcacggattaattctgaagaaagaagaaagaatgcaatcttagtagcacaattagtaccttgaataaattggagtatcgtatttcttggactatctgagaatgcagaggcaatttaaggatccctaattctaaggagaagaaacctttagtgtattccttcctgttgctttagtttgaattgagttttatatgtattttttaatctttctattttgattgttgtctaaagagtgtgaaagtgaattttgatatttttattttgcctggcgatgaatgccttctgctctggatatttaaaaattatatacacatatatgtgtgtgtgtgtgtgtgtgtgtgtgtgtatatatatatatatatatatatatatatataaaatttttctgagaacttttattaattcagcgtatctttgctaaacacctgccatgtgtcgtggtgttaggtctggtgatacaaacatgttcagagagatgattttctttcttttttggggggtgggtaagggaaagaaggcttatacaacagaatcttatttctcacagttctggaggctgggattccaagatcagggcctggtgagggcccctcttcctggtttgcagatggcttccttctctctgtgtcctaacatagcaaagagagacagagctctgatgacacttcctcttgttataagggaactaattccatcataagggccccaagaaaggtgcttttcaaaaacagttcagtaaaagtactgggttgtataatcactttaatgagtatcaatccatatttttaagatagaaatgaatgaaattagtaaaatagaatagaaataaggagtccatcacttttaagtaagtttcaatattgttcgtaaaactttggttcggtggtttgtgtgtgtgtgtatttgtgtgtgtgtgtgtgtgtgtctgtcggtgtggaaatactggatcactttgtaacatatattcaaaagcctctgtattttaacattatttctgcctttgagaggttcacattccagaggtgaagacatacatcctaagacaaaattataatagcattatgagaattacagtagagagctggacagggtctagcaaaaacagaagactaggctaaaccttccaaagaggccaggaaactcacctagaacggtggattttaaccttgcttatgcactgggggagattttaaaaatatctctgcccacaatagataccaactgaattgagcatagcatgtcctacccatgaatctattgtccagtgagaacctctgtttagagaaagtcaccttagaagaattgttaggagttatttaggttcatggggttgaaaagagcattcgtgatagaggaaacaccatatccaaaggcttagtcagtgtggtagtgtgagaatctgaaggaacttggctggggtatggttgctacaagaaatgaaattagatcaactggggctaaattatgtggaaagacagcatgatgtagcagctagagtatggaccttgtaagcaggaagaccccttatttagcacttactagcttattgtctgacctctgagtcccaattttactcttctatacaatgagtacatcacaggattttatcaggtttaaatgataagatatatgtaaaatgcataccagagaggcagactattggactcgaagggctcagtaagtgtaagctggctctctctgccccttgccacctatttttcagactctggacttttatcactttaagtcatagcctagttctaagcaaggaaatggactaatcagacatgtttttaaaagatcattctggtagtggttaggagaatgaattggaaagatatgagacccatgcagggacaacagttaggacattatttctgtaataagccaagcaagaattgatgatcaaagtggtgaggttgaacaaacaaaacagatacgtgagctatttggagataaaatcaacactgtcatatgttttgtgggaggtggaggtgagcagaaaatgtgaggtaaaatgagaaatcagtgcctgcttaccacttggcatgattgactgaaggtagtgtcttcactcaatcatgagttgcagaattcaagatggcaaacagttgtgaggagcaaagtcaagaacgtgtttgattttgaggtatctgtaagtgaaaaatcagaggtgaaaaccttacctctcttgaagcagttgtgaatgtaaatctaaggtttggaaaaagatctgggttaaagatttaaaattgaaggacatcaacatggaagccatagaaataaattatattacacacaaatttatgtcgttatttgaatttctccatggtccactcagaaatatatctaaatgtcaccaaaatgttacttactgtagtacagaattggtattaagtgatactattgtccatgttattcaaaaagacagttatagggaccctcttaataaactaattgtgaaaaaggcaaagaattagcaaagctttggcataaaattcatatcatgggccaggcgtggtggctcatgcatataatcccagcactttgggaggctgaggtgggcagatcacctgaggtcgggagttcgagaccagcctgaccaacatggcgaaaccccgtctctactaaaaatacaaaaattagccaggtgtggtggcacacgcctgtaatcccaactactcgggaggcagaggcaggagaatcgcttgaacgtaggaggcagaggatgcagtgagctgagatcgtgccattgcactccagcctgggtgacacagtgagactccatctcaaaaaaaaaaaaaaaaaattatgtcatggaaaaagtaaaagtctttgcataatgtatccaagatcatgaaaaactcttttcaataagataattagttccttttcttatataaacatggaaattttcatttttccttttattctcatattgatactataaaaaccccatcctcattcacaatactactgtctctaccctcgatagataccagttcaattgaacgtagcatgttctacccatgaatctattgttcagtgagaacctctgactataatgctcaggaatactcaagactcacatgattgtcttcttgctatatttagttactttattattttccattttgggaccctgaattcctgtagatctcagagaaaatccgaaatgaaataatgaaaataattaaaagtttagaaaagggagtcaatggggacaaatgttcaggactggtcttttatctcctgcaggaagaaagactgaatgcagaaaattagaatccatttttcatccagtcaccccaatttaatgcaatatgagtttagctatttgattttaagtgttgtaccgttttggaccatgttaccatggtaacatgaaccatgtctcattcatacgtaaacatgttaattgtattaaaacctttaaaacctacttctggatgttgccattacattaaacaattatctagaatgatacaaagtaatgactaaattgaataactttgtaaattaactattggattttgtaattttatatctataaaccaaaagaaaagcccacattggtaagaagacactgtgcatactgaaaagtcaattttgttagcctccaataaccattgtgttttattcctcgcagagcttttgtgaggatcttataagggaataaatatgaaagcactttgaaaaagctttcaagtgaaaggtccttattaattttatgaattaccattaaacaaaagtcaaactgaagatgtaaatctaataggatgctcttaaaagtcaatggatcaaagttatattaattaataaagaataataactaaatattttatgtttcataattggcaaagtatctttactgtcattttctaatttgatccttagtgaaaacctgtgatgttggtactcctattatttccattttcatttgagaagaataaaattggagaggttaagtaatttatctattgctacttgttaaaataactactaaattttattactcccagttaggagggcaattatataaactaaaagcttgtcacaataaatgtttacttttctgggattaaagtcatcatgtatttttcaattattaaggggggtaataataataatagctacctttttaaaatagttactatgtgccaaggtgtgtactaagtgctttgcttgcatgatgtaataccatcgtatatttagtacagaggaaaaactgagaggctgggtaacttctactaaggtaacacacaagtactggttgagtatcccttatccaaaacacttgggaccacaagtgttatggatatcaatttttttctgattctttttttggatttcagattttttcagattttggattacttgctttataattatgggttaagcatcccaaaccccaaaattcaaaattggaaatactccaatgagcatttactttgagaatcatgtcggcgctcaaaaattttcagcttttagagttttttggattttggattttcagatttgggatgctcaacccgaatatatagaaaagtcagcatttgaacctaagtttgactttctgatcttctaccaactctactgtcctacccattactctacattgactcagcattacagggaaagacccaagatcaccaaaagcaagcttcaaatcactcatctaatagaaattagtggaaatatttctacttcctaaacatccatctttcctttacattttaaagtcaagtttctacatctgcctcccaactgaaacacttctctatgaaatcaccataactaccaaatgcaaatatttttatcaagtcctcattgccctagaaatctactcatattttgttattactgctcactacagcctactgaaaaatgtctcaccttttgacttgccagggtgatatattatactaattgtctccttgtctctctaagcactcattccttcctctttctttcttctttttttttttttcacttttattttaagctctaggggcacatgtgcaggtttgttacatgggtaaattgcatgtcatgggagtttggtgaacagattattttgtcacccagataataagcatggtacctgataggtagtttctcagtcttcaccatcctcccaccctccaccctagagtagatcctggtttctgttgttcccttctttgtgttcatatgtactcagtgtttagctccacttataagtgagaatatatggtatttggttttctgttcctatgttatttcacctaggataatggcctccagctccatccatgttgctgcaaagaacataatctcattcttttttctggctgcacagtattccctggtgtatatgtaccacattttctatatctgatctaccattgatgggcatttaggttgattccatgtctttggtattgggaatagtgcagcaatgaacatacagctgcatgtgtctttatggtagaatgatttatattcctttgggtatatacccagtaatggcattgctgggttgaacggtagttcagttttgagttcttagaggtatttccaaactgctttccacagtggctgaactaatttacattcccaccaacagggtataagcattcccctttcttcacaacctcaccagcatctggtattttttgactttttttttttttttttttttttttttgagacgaagtctcgctcttgtcccccaggctggagtgcaatggcgcaatcttggctcactgcaacctccacctcccgggttcaagtgattctcctgcctcagcctcccaagtagctgggattagaggcgccttccaccatgcctggctaattttttatttttagtacagacagggtttcaccaggttggccaggctggtcgcaaactcctgacctcaggtgatgcgcccgccccggcctcccaaaacgctgagattacaggtgtgagccaccacaccaagcccacagtatcaattctatgcattcttttctgatttcattaatctcattatcttcatttgatatttagtcaatagttactgtcagttatgtgttagttattatactagaaacagtcttttctccatctcctttaatccaatgatttgaacatttttattcctttccaatgtctgtcccacatttcttactgtatgtaggacatttcttactcaaatgtctcacaaatgacataaattcagtatgacccaaataggccattttttataccaagtcttatttcctatcctgctgttcatcccggtaccatcttttcagtcagagagttcagatcatatagtcatttctaaatctcccacttacttgcctcactttcaagttcatttttaaggtctgtagattctgcctccctaattctttatgaccattcctttctcactagccccttacctccactctcattcacactcttactattttttaccctcctccactcattcctgcccaccagtggctccaatccaacttgcagatttccatttaaattaagcttcctaaaacatagcttaggttgtaactacaatgcaaattccatgagagcaaagatttcatctgctttattcacttgtatatatccattgtccaagactgtgtgtgtcacatgaaaagtgttcaataagtatttgtcagtgaacgaaaataatatatgactcccctcttcaaacaccttttttgacttcaaagcccttcagaatattctacagactccttcacctggctctccacaattgcccctgagtctcgtttccaatcttatttcttattttacctctcaatgcaccttcaactcctactaaaatgaacagctagccagcttacttctgtgtctttcgatgatcttgttttttgtcttgagattcctttttttcatctaagcttacccaaacattacctacttttcaaggaaagccattttcgaatcttccctttttccctgagcccccaagctggaagacatcttgtctccatctcaattcctataggcatttctctgcactttaaatgacgtttagtacttctgacattgcattagagagaggctggggtggatagtgtttcatagtgtgaactttgaagcccgactgcctgagtttaaatcgtgattctggggcttactgaccatagacgcatttctgaattgctctcagattatggagcataaatcaaaagtaatgacagctacctcttcaggttgttgtgagggtgatgcgaattaatgtactgaagtgcatggaacagtttctggcacacggtaagcacccaataaacatagctaatattatgttattactattttcaggcttatttttatgtatacatatagtatgtaattttatgtcaatatgtataaatagactttggtattgtttatttcactatcaccttgagagcacaattctcatttgatttgtgtgagaaactacttagaaagaaatagacgtgtgaatgaaactatgcttgaaatattggttactgtgagtgttgaaaatccattttgtttaaagaaagcttcaattgttaatcttccataaattttagttcttaagcgttcatattgactcgttttggaaaagctctttaaagtcttgggatataaacaaggctgaataccctcattcatgataacaaacatattatactgaaaattgtaagagagatattttatctttcataatgccctccttgggaaaatacattgacttggcccttctctttcaatcagacaccaaagttgagattgcctgaaacacagtttggtaaaaggagtttctttttcccaaacatcctgagtaacacaggaaatcacaccaatgactgatagataacgttaataaaattaataaagttgttttaaatgcataccatggggcagtggcaatgaaaacattgagaaggctgggactatttgccaactttctttgatctccattagaacctggacaagatccacataatttcagaacttcttctccaaacaagaattgaaaaggtcaggaaaagtttgaccacagaaaaatgtcaaagaattttgtgtcactttctcctcctcccttcctctaaccttgaataattttttagggttattggtctttgggagcagactttctagaccaaaacaaaaaaaatgatattcctctatgtgataggtaacaatcactacccatcctactggaaaattctcaaagtgtaaattgaggggataaaaaaagaatcttaagtcctttaaattatttttaagatgaactacattagtgcctctcttgtgcctttcataattctgataataaaacattccaggtattagtcaaagattaatggtattgaaaataatttaggttatcagcatgtgattttcattccacatgaggtccttttgcagtttacatggttttctaaattatattaaaataaaatgtcagaaagttcacatttttttcatgtttaacagcatcaatctttaaagaaaagttattgcacaaaggtctgtgcataaatcagccattctccgaagaggtaaaagaagtcattacgcctggttatgagagagagtttcatgaatgtaagagacataaatcatttcccactggagatcatattagtctagatggaagaatgtctgtttcttgatagtgagaaagcaacaaattacttttgtttgctcctgagtctgtggttgtccttgagaggtctgttagcatgttgactattgactattcaatattagcattataataacttacaatgatctgagtcacataaatataatctttcagttctctaaagattttactttttcctctctaatatctattcacctccaacacctttgcaaatatattattctctgggagttacaaagaaagttattctctgcaggaagcagcatttcagttgctctcaggagccaaccacatttcacctcaattctttgctcccaattcaacaattcaatattggattaaattcaaggctgtgaccccaaatagaatgagacctggatatttatgaaccacttgaccaggcattcttcccatgatttactccataaatcctttttagtttttgcagtagctttacaaatatttggaaaatggctgtgcaatgcagttttaaaaagtgcaatgagtagaggtagcttcttcacctggtatggtaaattgttgattctcttttggagtggaaaacaagtgttcttatttggatgcaaccattgcattgattagacaaccctaaattcatctttcatccatgacctgaaagaaattttgaaattcatgcaatatatacccgtagtggaaaatgtactttttgaatggattcctgaatgtgacttttaagaagagctattaagaagtgggatcttctacagaacagtaaacaggcatgaaaatatacaagttgataagatatggaactaccccaaaagaggaattaatagtggtggggcttggggcaggaggacagagagacctagccaaggaaggaagggctatattataatagagtacaaagtcctttagtcatccaagagaaggggcaccttctgcatcccttatgagtaagatcagagaaggtattctagttaacttttgctacataacaagccagcccaaaacttcatggcttcagtaaaaattacttgttttgttcatgaatctacagtttgctcaaggttcaatggggcttgcttatccctgtttcagttgatatcagttggggtagattgcctgatgctggaggattcacttccaagagggctcactcacatgcctggaaaataggtgctgactgtcagtttttcttcatgtggacctctccatggagcagtttgggctttttcacagtgtaagagttgggtcccaagagcaattatcctaagggacaagaaattaaagctgcaagcttctcaaggcctgccctaaaagcaagaatggttttgcttctcccatattctatttgtcaatcagtgacagagctctgattcaaggggatgagaacataaactccacctttccatggagaagtatcaaaaagttttgatgccatttaattaaagctgccatacaaagtttcttataaatgacactgagctgaatgaatactaaacagcaagtagtcattatcccagtcaagagaagttatctttgctcagaataccctttctctccttgtctacctggaaaattcaactcttggccaaagccctacctcttctcgaaagcattaccaggccttgcctctaagtgtacaattggagatacaccagtatactgatgtttttaaaactttaaacttttttctacaataaaacataaattaaataacttcccttctgacttaaaagctgcaaaatgctcatgacagtaactatataaattaaaattaaatcttaagcacgataaatacctctcgaatagcaacatagatgcttacttctttatttcacttctttatttgcttttctttgtctatagtttgccccaaaggtattttaataatatcgggttccatgtataccagtgtgtaccaattaatatttagaatatacctgttaataacctcatttgcatagccctactaatctgagcacagcgcagccttaagaaagtcttagtttttctcagtttagttcatctctcttctcttctcctcctgtctctcttatttcctatttctttttcttttcaagtgactttcaactaagtagaaaatgcatttcacatcactatgccggcctccaggctctgtctatttcattcacccaggaatgccctttctgaatgctttctctcatttagcagctatctattgaagttggacaaatgatagaaattcatttcttaaagagccagaacatcatcttgaacaagaagttaaaagaattcagcaaatcaaaagatgagctaatatgggtgaatcttagaggcattatgctaagtgaaataaaccagacacaaaatgaaaaatattgtatgattccactggtatgagctacctacaacagtcaaatttatacagacgtaaagttgaaggatgttaccaggagctggaggaagaagagaatgagggcttattgtttaatgagtacctgagtttcagtttgggatgatgaaaacattctagagatggatagtggtgatggttcaacgataataataatataatattaatgtacttaatagtactcaactgtatacttaaaaatggtcaagaaaatggtaccccgttatcctgatgtgattattacacattgtaggcctatatcaaaatatctcatgtaccccgtaaatatatgcacctactatgtacccataaaaaaaatttaaaggctaaatggccaggcattgtgggtcacttctgtaatcccagaactgtgggaggctaaagcaggaggatcacttgagctcaggagttcaagaccagcctgggcaacatggcaaggccccatctctacaaagaattcaaaaattaactgggtgtgggagctcatgcttgtagtcccagacacactggaggctgaggcaggaggattccttgaacccaggaactggaggaagcagtgaatgacactgtaccccagcatggtcaagatcccaaatcaaaaagaaatgattaaaatgatcaattttatgttgtgtatattttgccacaatacaaaaatggggaaaagcctattcgcttttaagtatccttaaaaaggcacagcttcttcagctaacagactctaaaactttttttaatagaagtattaaggtatttagagagtgcaaaatatcttattttaagtcaagaagttagggtcctgttcctaaacactagcctctgtaatcctggggaagtcagtgctgttggagatctcaggttgatcttctgaaaaatgatggatctaggtaaaagatatgtttctccaggtttacataccacggacaccatctttacttggaaactttattaaaaatgcattgtgtcagaagctctctggggatgggtcgtggaatctgcatatgtaaagagcccctaggtagttcttgtgcccacttaaatttgagaaccactagaccagatgttttgcttatggccctttcagctctgaaatttgaaaaaaaaaaaaatgattctgcaagacagagtctctgtgcttttgcaggataaagaaatgaagaaaataatacttcctgcttgtgttggagcatttttttcatttggtatccccatctccagtggctagccaatcaagaatagtattgtttattcttcccactgttttgaagatacaaaaggaaaagctaagccagatgacacctaaaggcttccattaccattttcatgtttttccctttgcataaaaactgtccatgcctccatcagagccatgatcactagtacaatgttacactctaatgactcatgacattaaattatatcttagcctaatatgaccaaattacaatatcagaataaaaatttcttttttcaggttgaatcccataacttaatccaattataatactggctgaatttttcacaattatgtctcagtcttgatttagggaatcttctctttatcataaaaatgcattttgttaaacatgtttcattataatcaatttctcaaaagtaaagttaatcaagagaaggaaaaaaggttttgttttgatttgatttggaatgtgtatgtgtgtttactgtattgaaatagattctgtctgaaagactgtatataagataaaaagtacagaagagtagtcagagagttattacccacccctgactgatggtgaatagattatctaagtatcccgtaaaaggcacaactccttcaggtatattttacaaattaattagtaactttctagccaaatttgtgtcttaaagacaccagctagaacttggttagttctagcaaagaagattattttattctgaaacaggtttttgttgtcgttttacttatttgaacttttttcttgaatatgtatttctttgcacataaaatatattgacttatgaatgtgattaaaatggaaaataattagttgattttagagagacagagagaggagaagagaagtgtgaaggagagagggaggatagaaaggagagagggagaacaggaaggacagagggagaatgggaaggagagggagagagagagacagagagagaggaatggagtgggtaataagcaagagaaaaatgccaatcatatgctttgctagtgtgtaaagtctgataacccaagggagagaggactactctggcctagtgaaacaaaggaaagagaaatatggtagaatattctcctggtgcttcaccaaatgtgacaccagaagtctgacagaagtcatgtcagcatttgagctccataaaactcaggctatcgacctaccatgtgagagtctcaaaatgagtttaggtaggggcagaggagttgaaatccagtaacatatgcaacagtgatcacaccaggattgcacatagaaagcaaattagtcctctaatagagacgccaatttgaaattcaccctctgagcaggtttttaagcacactcttcttttacttttctatttacaaaaatggaacaccaccagaaaaacaagaatttgaaagacgagatgagaaaagtaagttgtaattggaaacagacagaatgtgtacacaaacacacacacacacgcacacacacgtgcatgcacaggtgatgagagagtagtttgcctacatggtgtatctgactaagaagactttttgctctggttgtcttacaggaagtgactaaatctcatgatgtgaaatattttcttgcatattgtattggaaaagaaaataattttcccaaactccttaggggcagtgttgtcttataattcccatatagtatatgctcttcaagtaagtaactccagagttgagtaagacaagactcgtgactcagatggcatgctctgctccctagactagacattgcatcagtctgcctatactcacatccgctgttaaaggattgcctccagtaaaatatgtcttttaattccttatacaagaatctggaaaaaaaaagtaagattctctatttcttaaatttagcagcaggttaatcactgataacaataaaaatacataacaatcatctagcacgggtaaatattgtggcaaaaattacaccctgaagaattcagtcaaagatataagtaagtacacatcattgtcatgttccacaatatatcatctgctttaaagaaactgttatgtagctgtagtagatttaatcattaatcccatttcttctccaccttctgcaatcacaaccttaacaatgcctccttatgagtggaatgtacttcccaacccctagtcttaggggttggccatgtgatttgctttagcaaatggtaaatgagcaggagtgagaggtgacagttttcagcctaggccttaagagatctatacattcctgtttgtgcttctgctatcattctgagaacacgtccatctaggctgctggtctcaggaaaacgataaaagacatgaacagcagggctgcactagccattcacatccaggaaaagaaatgattgttgcataaagccattgagctttattctacattactgtgacaatagctaattgaaatagtaaatatactttggtttttcctaaatgcatattgaaaattaataatattagccatctgtatgataaaaatataaagcctatgttttattttttaatggttcactgccctaaataaatttccaaaaagtagatgttcccttgtctagtgatgtcattatattttatttatacatcataaacacactgtttatttctgctcatttttttgtaagtaacatgtgttaccgccaatcttgagatgatacacacacttctgtactaaattttggaaaacatattagctacccactccttatatcaaaatattgcctaataatgtgttttgttttaatccttcatgaatttccaggagaactgaactgatacttgggtttgtgagatatatgaaaatagtgaacatgaacttctggtttaacccttgtgatgataatggaatcatagctctgttaattactcttgtggtttgtcttcctagagataatcatgtacaaaattcctttccaatttgttatataatattagaaatacttccaaaattggcatggatttattgttatcatttgttggcacaatcattaaaacgaaacccataaagctagataattaaatgtttacaaagctatagtactcaaaacaaaaacactgtgaaaagagattttttaaataatagtttttgcatgccttttgaataattggattattctgaatttcttcatgtttagtccctgaatctaagtcataccgtctacataaaaatagatgtcagctgaagaaaaccaggcaatggatttgtcttgacgacaatctttttatatgttcagacttcatttaacattagacttgtctgtatttgaaattggtatttctttacatttctgaatttagggaaatggcacaagagaataacattaatttcctctgcattttggcctaatcaaatttgagcctttcaagagacacagccaagtcaattcaaagagacatatgaaaagactactgttaatgtatctttaaaatgaattagcggcatgaactgttgctaggtgagttaggtatagttgtagtttttagtaaccctaagagaagatgcagtgcattctaaaatgtcacaaggagtttgattgctcaaaattctgggagattggctctctgcaaggcttcttgatgtcattgttcctagaggaatgttgttccagtacctatagcgattgcagccataactatttatgtgtcattgtagccattgttattactacatgcttcacatacctctactgaggtctaaagaattagtggacttcatattctggagagaacacttgaagaaccaaacagaagtttgatgtgaatctgcatatccaccattattgttcataggttctcaggattagttgagtgatgccttaaagaaagaaagtcagatgataggtcttcctgctgcccgcaccacatcatgagtgttattcctatagaggaggagtaaagagtgggaagaaaatgaaatctgtcaatactgtgaatatataaataataaaagtagcagtaggactgattaattctgaatcatctttatgaaatgactggagccgtgaaaatgctcagtctgcacagctgattgagaaatgtatgcaatctgttgatcggaatttatttgtgaatgctctcttccagagatttatataccagagttcttaaaacgaattttgtccccatgaaaagaaaactacagatctgtaagactgcaatttaaaatggaagaaaacatgttcccacttgaagaacaactttcaaacaaacaactgatacaaaaaagtcaaaagctgttttgttttatataatagtttcagaatacttccagtcaatatataccttggtttggtgaaaaaataaaaagctaaatccttagatcattaactagaaatttttgtaaaataaataaaagccgtgggttttagtgcagtgatcccatgaagaggaatatattcaccattggtctcttaatctcagatagaatgtacatgttactttattttataacgaaagcaactgtgttgtgatattatgtataatattataacaggagaagtcctcttagctaactcagtaatcaataacattgtacgttgtgtgttattgtaaccaaaaactatgacagaaccccatttcataagatcagtttatccacctatatgatttatatttgaatattcatttcagtacttatgttgcttaaacaaagctactgtattagtccattttcatactgctataaagaactgcccgagactgggtaatttctaaaggaaagaggtttaattgactcacagttccacatggctgggtaggcctcaggaaacttacaatcatggcagaaggtgaaggggaagcaagcatcttcttcacaaggccgcaggaaggagaagcgcccagcgaagtaggaagagccccttataaaaccatcagatcccgctatcatgagaacagcatgggagaaactgcccttatgattccattacctccacctggtctctcccttgacacgtggggattatggaggttatggggattacaatttaagatgagattgtggggtggggacacagccaagccataccaaaaactctgttttttgtttttgtttaatggaaatgatttagaactttattttctgatgtttctttttcataaaaccacgacaccaaaatctacttttcactgctccattcaactagtagagaatatctaatctcttctcaagtatttctttctcaattatggtggttttagctaagaacagcttatggcatgcttttctaaataatattagaacacataaattatctgtacctggtattaccacattcattgctcattttaagatctcaattgatacattcaattcatatatatttaaaattgattcatttagagcaagagatacaggcattttaatgtattacactgctactaaagcttagcaaattattcttttttgtgcccacaaattatcatccattcatgtcctaaaaataaaattgaatttattatactttcccatttatccaaaaaaaaggttttttttaacaattgatgcagatacacattttcaagctaaaaatatgtgtgaaagtggcctctttctcatagtatttattttaggagtctagcaataatttttcttaggttatcagcacatgtcttagcctgaattatttgaattcagtctgtgtcttcaagttcagatggttatgtgatcttgttaagatctcaaagtagtgggaatgatggagtatacaacaacctcattgttttttatggcaactgtcatttactgaaggacataaggctagcagaacatggtcagagaaggaatcaaagtttggtcagccaactctgctccacagctacaagctgctagacaggcataaatttttccaaacctacacaaagggacttagggcccttggctgagagcgacattctaaccacttccttatttatggctggtggggtttgtacattttctcatttctgtataacatttcttgactgtaataagcaatgtattcattctgctttaccactttcactaaccttaacctcaatatatactcaattaagcaattgaaaacagcagttttaatcttttgacataaatgatttcctccgaagcaaaatgctggaaatcccctcaaatgcaccttttattgatgaatacctataagcaccacctacagtcgctggaggctgacaggaaccaaacttgatgataaccactgagctgagaattttcaactcactctttttccctgtatggttcttctagctgcattatttcccactatttaaagctacagctggtgaactattcaaatatttaaactttggagaagaaaatatcaacttatcacaaccctctttttatattctaaattcatatacctgtttggtacttaaaggaaaaatatgctgaggaacaggctggtcataagactgtatagaacgtgcatcttccatcctattgaggtgactcctagacaatgggaaaaatgccttcactcgacttgctcattaaatgtgaccgtagctgctaatcttttggcgctgtctcgaactttaattagatgtgctcttctcttgaaggttggaactacagtatccagagaccatagaatcacagagttgaaaacaaaatcttggaaatcattgaatccacttatcagatgagaaaaaaaaaataagcccatggagatagccattttaaaacatatcattctatttagcctccaatgtaaaacaatgagttactatgtttcaataatgttgatgttaagaaattatttgatagcttcctcacttggtctcctatattcctccaaggttactagttaggaagactgtcattcaaatttggagactacataagaagcagaaaaagcatataaagaggcacatgaaattggaacttttctggtaaaatcttctttcttaaactctcctcaaataagctgttggtggcaggaggtgaaagacagcctccaccctttagcacagtccgtacttgtcagcatttcccaggaagggtgatgtctggaaatgatagagattgtggaagcacattgcattatgggtcaagaatgcgaaggtcaaggagtggagtcttcctttacgaagtagtgttaactgcttggcgtggcattgttgtaaacagaagccaccaggaaggatcatccttaggagggaacctgtagatatgactgaaaacaagagagatccagttttaccactctggaaacataggtaatagaaagcccaaaaggtaccttatcacttgtttgttcctttctgtacaaaaggacttaaatcctttctgagcaagaaagatatttgagaatccaattttgttttaaacttgagcttagcattttggaactattccaaagaccacagaattcacagtcattagcataccacagcagactcttttcaaatattgcaaaccagaacagtctgcttgaaaacctggaaatacgacctagtgggttcaacttgactttttttatttctaacccttacccctaggcaattattgataactcattctggtacctggtatgtatatggactttgttagaagaatttgacaactttctaatcatctgttttttttcttttgcttgatagacatacatttagtagaactttactggattgtattgattataaaccacatttcagttcatatcagtccattttgctgcacaataaacaaccaaaaaaatttaattcagtggctaataacaacaatattgatttattcatggagctgcagtttggtagggtttggccaatcatggctggaaatggtttagctatgcttatctctaggccgtcggttctgttcgggtctataccacatattttcttctgagactcaagctgaagggacatcagctactcggggtatgacagagtagcacaaggcaatgacagaagcacaaacaacacttttcaaaatctctcctcttgtcacatttgtttatagcccattagacaaaacatgtcttgtggccaagcccaaagtcaaggggtaggaaaatactttccacctatgtgaggccatggctggagcgtgaatgtatgatactactagggatgtgaaaggattgaggccaataattcaatcttctattggagacaagctcaacgagttagttaaaatggaaggctaatatttactaactttgcaacccaaggaagagaaagcaggatctctctgacgatgacggaatttcataccctcatctttgaagttatactaaagcttaggaacaaccgtcagataggactgaattgctcccccttccagattcagcatgtgaagtatgcagcatcttattatagcagtagccaaaacagccgttttcttcaatttgggaatacaatgtaggtgtgttaattttcaattaagagttctaaacttattatctgcttggtagctcttccatgtgacagtcattccatctgactcttcatgttggcttttgaactaaattttaaaggaaccgccaaaatttaagggccatgtactttttataacctgtttgtggtctgggtaagaaaataaaaattatacaactgttctttttgaccagccacaagcatgtaatgaaaatgactgttttggctagcagatgtattagaagctttcaaggtgtttaaaaaaaaaaaaaaaaactggagaaaggagccagtgaattgacctcaaacaaaacaagaacaaataaacaaaacacttgtctgcacttccaaggaagggtgatatctagaaaagatagagatgatggaagcaccttgcattatgggtcacaaacgtgaaggtcaaggggtggcgtcttcctttatgaagtagtattaactgcttggcagggcattgttgtaaaaagaatccaccagaagtgaaacaagcagcactaaaagttaaaagatttatgtgtaaacctcatctaaggcaacagaagccatttctataaaatagtataggaccttttattatatatggtcctagagtatattaaaataagtctgtttgggtccatttgcagctcatttgaagatttttataggaaaaacatcctcaaaaatatcatactacagtgccttgatgcttttttctttttataaggtactgccagcccaaatagtaagaaaccgatatgatttttgtccatgtgaggtgtttaattgcttcccaaaatatggttattgtgtagatgtcactaacgaaatatataaagagcagtatttgggaaaatttattttaataccacctttttccttttttaccctaaaagtatttatttttttcgtagcatacactctgtgtctcagtatcattgtttttcataaaaacataaattcttaacagaaaatttcctgcaagctcccctaagcttgaagagacaaaggagatttgtaatgtagctcagccccaatcagggtaaaagaatgcagggctgactttatacttataactcagaaaaaggttatgcttcccgtctcttcacagagctagtctcttaattgattccgaactaggaacatgtacaagtggcccacgatctggaacagactggcggataatggaatattgagaccttgtctatggtcagccatattaacactggataagtctgataacactgtgattacatatgtatcaatatagtatgctgttaatatattaaaaacttatttacaacatgattattggacaactgttacagtacagccacatcaatcctatatcaagttagaccatgtcaactggttttgtgttgagacacctgtgtatggacatagtctgaacttttcatagtttgtgctaaatgatagcaatcaacatcggtatggcacttacagtttactgataactttcatgcccattaacatagtaccgcaataactctgtgaagtgctgaatttgtgtcctgtttcatgattgtatttgtgttgatatctcagtcagtcagagtcccaacaagaaacagatggcacattcagattagggtaagttgaggagtctttatttacaaggcactacatactcaggattgggcagggtgtagggaaatctcacaagatagcacaagactctaggactagcagcagcagagctgtcacctctcctagacctgaagccgttgttggggagagaggtttctcagagcccagaaaaaaagaaaaaaaaaaaaaacatcatgcagattttaatgccttgggaggagcagtggctttctcttaaggacagaatttgcctcgaaatgatactcagggaaaaagagatgaagggaatcaatactctgacccaagactctcccttctctgcagtggtttgctagtcctctccttggtcaaacccaaacagaaaaccatagggcataggagtctaatgatgtaatccaagtcagccccctggaaggtggaaaaagaagggaaaatggatctggatctggagggataccaaaaaaaaaaaaaaaaaaaaaaaaccatagttggcatgcttgtttattgatattttcttgcatgatataagaatccagataaatatagtaagaggtctattttactaacaattttaggcacctaataataatactccttctttgaatgtataacctctagaattggttcagaaatgtaactgtgccgttacaatttctattagtattcaacagtagattcatatccattcatctatgactggagtatctgccatttgctggttagttactgtgtaaggtactttgtaaggtatagaaatacacttggggtgcgatggctcatgcctgtaatcccaaggatttgggaagctgaggcaggcagatcacttgagtccaggagtttgagatcagcctgggcaacatggtgaaaccccatctctacaaaaaatgcaaaaagagtacctgcgcatggtggcatgtgcctgtagtcccagctactcgggagcctgaggtagaaggatcacgtgaacccaggaagtcgaggctgcagtgagccataatggcacaactgcactccagcctggatgacagagtgagaccctatcaaaaaaaaataagaaataaatttgagctcagtgacctacattctagtgcagaaaaaaatgaccatagttgattatgagattttaaagcaataaaccacatgagacatactaatgagctcataagatcattcagaaattgtttattatgaacacatagtactttcagtgtggcattaaacagagatcactgtccttaaacaagttaaaagcagaatcaaatcatctgcaaattaacacaccactaaactttaagcttcttgagtgattctgtaatttttaaaatgtcttcagcatttcagtgtcaagatagtgcaaactcagtaaaagcttgtggaattgcattaaacaaaaccaaaataaatagattttattaaaactatatacaattgtctttctaatcatatcctctccatgaatagggaagaaataattttaggaatttaaatatcttctatcttaatagttcctcttatttccctcttaagcaatgttcactccttcaaaaatatttattgagcatctaatatgtacttaacactgtgccaggtgctgtgaagaatgccaaggaaatagaatgaacttctaattctttggagttccaattaaataacctaaagttaaattggtttcggagagaacattatgccttcgagactgtaggcttctcttgattagaaagtcttaaacattttaagtaactaaacagattaaggagaattcaaggatgcctctcactagtaaatttggattagtctggcaaacttcagaccttaaatgcaagatttttaataattaaaagaagagagaaaatgataattacatttctagagtctatgtttaccattcagccttcttaatcatttcctaagtatatctggtgatcaggattttataactccagaaaatctttctatacatcgcataaatctcttcttttaaaaagctcttcaattttgtattttgttaaaacttaaaagcctccatgaaaaatgagacaaaagtcagtgagaggctgtagcaataaaaatcagatgtgattttcttttgaataacatctgtttttacagtcctttcatgttaaactttataagaatttattataaacagctttattgacagttcaatcctatttctaaaaggatttattttcccccaatggtaagagttttcttttcttaaacctaactagttgcagatatttcagatactacatttctcattgtgtaaggtaaagtttctgaccacctgaatatgacttgtagctcctgagaacaatttgtttagtaccgatatcatgcagtgacattggtacaaaggaattttctttatttcactgtactgttttcagttttattctatagttgttaaataagaccattaaatatttttattagtcttatttcctgtttaactaggtgggtttttgatctctgttcagtaaagcattgtgctcttcagagcaagcaattgaaaagcaaatagtgagtatttctactgtaaaagtttaacattaaaagatatacacacagccaggcaaggtggctcacgactgtaatcccagcaatttgggaggctaaggcaggagaatcgcttgagcccaggagttcgagaccagtctgggaaccatagcaagactccgtctctaccaaaaaaattttttaaaaaatagttggatgtggtggaacacctctgtaatcccagctactcaggacgctgaggcaggaggattgcttgagcctgggaggtcaaggctgcaaggctgcagggagctgtgactatgctactgtactccagtctaggtgacagaatgagaccctctctctctcaattaaaaaaaaaaaaacaagatacacacacatatatttgcgtaggtaactctaatttcatttcaagtatgttatgtaacaaccatttgtgtagtgcttgtaacagtcaatatgtaaatactgactcatcttctttgacaattctacctagatacttattagagtcccccttagtcattgaaaggaaggttaaaatcaaaagacgttgtttgccaaagtaatgaaagaaaacttataaacacaatgtatcatgtctggggctgaactaaaacccttctgatatgtggtattaacagatcatctttcatgacagtaccagttattagaaataaaatgattggagttattattaatactaacaatagtggtattcttaaaatgacttccttatttatcttcacctttatacattctactactgcttcaagacccatcttgaattcttcttccacagaacattctgcattaatttcagccaacattgatttctctttttaaaatttgtcttgcacagtgaattagaaaaccaggaattggaaaaccagaaaagcttattaagtaagaagcagagaggagagagtttcaacaaagggccattctaaagtggtctactgcggacaccatactgattatagttggtgattaaatcttatctttccaactgattataaactcctccagggcatactcttatattccacaagatgcttatctgggtgcagagcatgcatgcagttggtatttgctgatttatcaactaactaaatcttaacatattattattaacaatttaaaataaagttaaatgtatcactctccacccctcaaagccatttctgttctttgttttcatagcaccattattatttcctgcatagtattttttaaaaaccgtatttttaaaatttatatatttgtttatttgggtatacttcactagattgtaagcgtcacaaaagcagaactattataaccccagccactaacacaatgcctaacaaatagtaggttctcaatatttgttgaatgaatgacctacagatattacttcattatgaaagattttgctaagttgttttacatctattttatccaaaactaaagttcttgaggcaaagcctagaatatcttctatgttctcacaatgctctgaatcagtgcttctcttaatatgcatagcaattgcctggagagcttgttaaaacatagattacttagccccaaccccagagatgctgattcagtaggtcccaggtgatgctgctgctgtcagtctctggcgcacactttgagtagtagggctctaggatgttatatgtacagacacatgctgaatagtgggctatgtgcttacttgctggctaaataataaatgttctcactgagtcatagaactttgaaatttgcaaggacttttgctattatctagtctatggatagcaaataacctgataccgtgctatagtgcttgactgcatttaacctgcagaatcctcatgagcagcccagcaccatcactccaagtgaaactactctcttcttgaggttgtccaattctatcaattaaagatgaaaaccaggttctgagagttgaaatctctggacttcaaaggtccaacagcccaggtcttctcaattctcgttagtgtttcagcagctgaatacaaatttattaagctgtatcagagtagtatctgtcaaattggagtgtccataatatgcttaaacagagaactccattccaataacatgaactttccttatgctttattcatcatcgcttgaaattttgaattttgcccaaagaagtttataccagtacatgttaaattacatcatagccttctttgtataaatcttagagtagtttactgaagtacatcgcaaagttttgttgtttcttaggtgattttaattatgtatgtttactttcagtaatgcatcttttctccttcatcaatattatgttatgctagctgtaagtacaaaataattgagaacaaattatgacaaattgaaccaagccacaaaaaaaggagaaaccaaatacttttgtgatttgagcttttttcagtccttgaaactttaagaatatctgtctttattaacttttgctttttgctgatggtttctctcattttattatagcttatagcattgtaaattaatttaacatgaaaggataaaaacgttgcttttgaaatgtttctcattaaattatgaaaaaatattacactaaataaaagaaaggaatgcctctggtaccagcttctgtttgctcaattattgcagtacccaaagtgaattattacacagttaactcagaggcaatattattgtcattatattataaaatagatgagttgcaatcttcaaaaaaaaaaaacagcataggtcctttgaaagtgaaataccttttttccttgtgcttcatttaaatatatactgaccccagttttgtttttgtttttcctttttagagttcttgctaatgatgggcccaaagttatattaagaactgcaaagtaaatttcaaccaattactttattcaggggagtcattaaattgaggtacctctgaaattttggaaggaatgtactgccaattagccgaaagcactactcaatgtcctttctatggttataatctctctagtgtatttttaattgaagacaacctctatagaggaggtgagaagttgctatttattggtacttgttaggatggaatcaagggtgtggaagatattcatctatttctctctccagctcccccacacaaaaagaatggtgcttaatccatctgaagcatttggggagcgagggtaaagatgtaatatttaccatgagccgaaacagatcttcagaagtggaaaatggaagcatattgaagtccctcaactaaacagactttcttccatatggaattcaatgcattaatgttttcaaattctatagcttcaaattcttaatattttcaaattatgtgagcttatgtcaaaacatttaagtgagcttttaacaatgaggcaaatatttgaatcatttgtctacataacaaatactactataaagcatattaaatgttataaaaatcctaatatactaatgtaagctattataaagtacaaataattaaacaatatttatatgatcaatgttttataatacgataaacacattaaataattaaaaactcttccaccgtgcaaaaatgactaaataaattgttaatttctaaggctttttgagattactgtgaaagggggtatagtttcaggaaaggtgaaacttcccttcaatgtgtaaaccattaaagaacataataacctactgagtgtgggtctcaatgatatgccctggaaagtatgggcaactactccacacccaattttgtctttatatgataaggcacagcaaataattataatgcaatggataaatggtaaatcccaccaaagattaaccaatcagagcaggatgaaaattctgagtttggaaatctattggaagatttacagattagattaaagtgcccagtaaccaaactatcaaaattatatggcttcagttaattaatgatttccaaggtttttagtatactgtattacaaaacacattaagcatcttaagcattcaaacaacatttttttgatgattcagaaagcatcacaaattgttatatcagctgataataacttaggtacatatcaattaaacttgtattatagacacgcagaattcttcagaccagaagtcgaaagggcttctctagtttgtttatgctaagttgtttagagatgacataactctgagctaatttgtctattgcaatggttctcaaaatggggggcgggggatatttttacctccaccaagtggacatttagcaatatctggaggcatttttaattattattactggattggagatacaactgaagtctagtgggtagaggccagatatggtataaaatatcctacaatgcataggatagccctccacaaggaattatttaggccaaaatgtcagtagtataaaaattgagaaatgctagtctaatatagtgtttactcacctttcctgaaactatgtcccctttcacagtaatctcaaaaagctttagaaattaaaaaatcgtttagtcatttttgcatggtggaagagcttttaattatttagtgtgttttatcttatgaaatgttgataatataaatattgtttaattatttgaactttataagagcttatattagtatattaattaggattttatttaacatttaatatgctttacaataatattcattatatagacaaacgttttatttttttcactttaacaatgatttttaactctaattacataagaaaaagtatgagttaacaattttttaaattacatgcttggtttgagggccaaatacacatgaaaatgtggactaaaatttaaaatcaaataaaatctataaagtcgaggaaaaagctacttttatgacgaggcatggggaattcttcatagtttttgggttttatcagaagttagctattttttttctttttgctctgtaaacaatcagataagagaggctcaaatgacattttcaagtacatcttaacaaaatacactttgagcatcaattgagtaaagtttcattcttttgaaactttggttttcacaagatttcctgagagttttattttattggtgttctgtgggacttgggcatcataattcttacaaactactcagctcaatctaatgtgcagcgaagctctgggaacttttgttttgtctagtatccagttggaagattctatagctacagagcttgggtttaaaccccctccaagtctttaccagctacctttatgaccctggcaaattacttaaactgtgtgccaccattttctcctctgtaatacggaggcaataaaaatttccacttttagattttctatatgcggtttacaaattgacttactctgaagatcatctggagtaaaatctggagaaatatgatcccttataacttcttcaaccctttatatatttcaacatgagtaaccaatgctctaaatatggatataaattataagaataaaaaatctaggactattataatggtctaaactctcttcatagctaaaagtgttgagtaattaaaccagttgagcagctaaatcatgtacacacttctttgatccctcccacgatcatgtatttggcattgtaatgaaaagatatgtttattttcgagaatagacataactacctttaataatatgatcacccagaaatttttacaaacccctggaaaatttcatgaatatcaggctgtgctcataaaaccttagagatgagatcacaatagactgggtcaacatatagtaatgagcaggattaataaaacctcagatgggcatttacaaatgagtcaaaaccatgagtataattaaataattgtagcaaaaaaagagccttgggtaatcctttcagcaaacgtaatcgaagtgattgcatttagaagacaaatatttaatttggtgactagaaggtcttttattattccattatgtctttgtgtgtgtgtgtgtgtgagacacttttcaaggtcaatttttacttataaattgtctctaattaaaaattgacttggttattaaatcattgaaaattggccatcatcaaattcctcattaaaatatttctatgtgccatatatatatatatatatatatagaatatatatgtagaatatatgtatacatttatttttactttttttttactgtgcctactagagaaatttaaactacatatatgtagaatatatgtatgttttaactagacatactgttaagtacactatacctaatatttggcaatattaataccatctcattgagaaacctggaatatatgcacattttggatgtctattatatgttgggcactggactagtcattgataatacagagattagtaagactcaggttgacttcagccatgttgtcaggaagcacacactctagtttgggacagcgaggagaaattcaataagagaaatatatataaggcataatgctctaggagaatatgcagtggataactgcccaataggaccaggcaaggctttttagaggaggaggtggcatttgagtcaagtgttaaaggctgaatggaaattcactggttgagataaactccttaggaggaactactttaatagaacttgccgttagtcctgaaataaatggtgtgcaaaatcattaccatctgtcaattcactcagtctactttgctcttaacttcagaaaaaaatcagaaatacaattaaaacatttgagcctattttactgtcttttaaaatgagttaattcaaagaggaaattaaatataatgagagagaatctcccccgaggattgggggctggggaaatgctattgattctttgcttgtgtttattttctctcaaaaatacattatgcataaacttgatgatcaaaaattcagattattacatttctaaattggcaatgcaatttattgcatcatacatcaatcacaaaaatgctcatcttgctgactttcataaacttctaaatgaacaaaaatgcaaaaatagtttatactatattacactatagtagatttgttaaactaaaccagaacaatggtccatgaaaaataggcctctgactccaaacgctcacaccacaggatctctctgagatttttgtgtcatttcaagtcagagaaaattgtctaataaattgttggcttgtaacaatgaaaactaagatatctgtggggctattcttgttctcttcattttactacagcagctctgcccagtagaaataaaatgtgagccacatatgtaatttaaatttctctagtaggcacactgaaaaaataaaaataaagaagtgaaattaatttcaacagtatgttgtatataacccaatatacccaaaacattgtcattttaacatgtaattgttacaaaagttattaattagattttttccgttaagtatttaaaatctggtaagttttactcttacagcgcaactcagttcagatcagccacatttcaagtgctcagtagccatatgtgtctagtggttaccatattagaaagtagtttgagagatccacattaaaccaaaaggaaaagaacttccggcccttcactgatgagtcactcttcactgctaaccttggaagcattcccaaatgtagtctacagagtttaaatagtctatcttaacatctctcagggcttcagtcttaatgccatagtatttttaaagaatggtggatattcttttttacagaacactctgtaagagcaattagaagtttatgatgcacgtaatgcaaaatacaggtcatttcccaagcctattttaaaagcgcaaaaactgtagtcatttatcacccctgagaatgttgtcttaaatgtcttggtttggatattggtgatgtgagaactttgtgataagaaagtagtctttaagaataagatatcagactaaaattcatatctagaatgaaagtcttgtttttaatggaagattaagagcaagtctgattcagatcatgcatggggtacactagtctaggaaaacactagtctgaaaatatactaaaagttacttcgcaacttaacaagaaaatgtcttgtgggtgatgtcgttcttgatttttaggcaaacctacctacctttgcaaagcagctgggacctttttgcattggaagaatcatttggagcacaaacaaaattagattatcaacactttggaaaacaactacgaatgagcaatcagaaacctgaccttaagattacttgtgaattgtgaatcagcaaaataaactcgattgttcattgctaagtgtatttcaattatcaagggccttctagattataagtagtcttttttttttacttagtttacaattaagatgtgtggtatttgaaatacatttgccacagggagaaatataaattataattaatttcctaggctaattcaatttatgacatacctatatacattatctgtcatctataatttttcccttattgtttacttcccactggaagaatgaaaatggaatattattacatggcacatggcttgatacttttacaaactctgacaattatgtatttattttgggaggcattgagtttatttgttttatttatataaatttatgaggtacaagtataattttgttacatgcatagattgtgtaatggtcacgtcaggccttttagggtatccatcaccttaataagatgcattgtacccattaagtaatttctcactctcataaaattctaattatgtgaatttaatttaatctatttaatgtgttttaggcaaatatagccggtactataaacagttgattttaagatatcattgcttacattgagactaagtaaaacaaaatgggtcaataaatgtcaatctagataacaatgtcaactaaataagaggtcaaacatggcagtatttttgaaggtgatctgtgaaagtgattatagcgtttacactcatggaaaatgccttcagagtttcaactaagaatgccaacagctcattcctttatcctgatgcatattgtcttccttctcacccccagttccttcttcccctaacccctacccgctttcctttgctgattttgacagaaataggacccccaataagtcagggagatagcaggaaatgggataggatagaacccggaatgatagaatagctgagcctgaaggcatgaagaaaggctcctcctgacatctaaatggagacctaagagatgggttggtcaggtagggggaaggaaacatgaggagtattctctaagccaggcaacatactgtgcacaagtctgaagtcatgggaaagtgattttgagaggattgctgcttggtaaacctagagtttgaattgggagagatgaagctagaaagttagtaagggtcagattttttttttttttacttgcatgacaatggtaaaaaccactaaaggttctgtgttaagcagaggagtgacttcatttaaaaaggtaaattggattgaaatgaagggcataaactgaggcaaaaatatccttcgttaagttattgaagcccagttgaacacactggtggcttaaactggagtattggtataagtgggggaaagaggttaatagattccaagttgaaaaaaaaaaaaaaaaacatagactttgctatctagtaatggattaatatacaaaaggaaaaagtaaagtttctactttttggacagctagaaaccttcaccgaagtagggaacccaagacttagattatgttgggaggggcagggtattttagttgcacagggatttgctttacagaaatgactgaatgacaatatagagagatcaattccattaaaagaagtttgattactcacagttctcaagggaagagtacatactacgccatgcaaagccatgcaggaaaaaagttccagagtcggtcagcaggcagaaaaggaaagcacagcccaaaccctttattgtggtttccaaggaaaagaaatgagtgaggtagaataggcaagtctgagcaagtttaggactggatagttcaaataatttccaaaatttcctggctgtaaaagtggtctctggttgtctggtaccaagccctagggtgaggggaaaaagttagggtgggggaaatattggtttggtgtaacaacagttagatgaagaaggtagttggggatacggactttggattagttggtttgtataacgaaaagcaatccaacaaatccacaagggagcaagtttacaagttatttgctatctttaggaattagctagccctgggaggggcagtctctccctggccttccaaggacctcaagatgttcaagcatccataaaatatggaaattttttaaaaacattataaatacacagagtaaacgctgggcatgatataggacagtggttctcaaactttagctccactggaatctcctggaaaacttgttaatatgcagatgaccgttttacccttaagcttctaattggggaggtctggggagggcacagataatttgcatttctacaaagttcttccatgattttgatgccgctggtgagggaccaggctttgagaacactgatttaggacgtgtcctgtttagggaatatccaaaaggcggacaagttcagggaatattcttgggcagttggctgtgtgagtctgaaattcaggatagaatattaagctgaaataaagatttgggagcttatctacagtcaaatgataattgaaatactgagagtacggggggagagaggtccatgtaccaagaaaagtgaaaatgactaatcccaagcctcgctgaccattgagaatggagctaagtgagaggagttaacaaagctgacccagaaaaagtcataagggccttaggaggccaaggaaaaaaaatacattcactgccaacgagaggcacttacgaatggcttgactggctttgccagcatgcatgaactgcttcataattatttgtattgattacagtaacagatacatattttaacaagcaacttaagtaatacaactgatttttaattatcttgtttaaattgataaaggttgtatatattcatggtgtacaacatgatgttttgatatacccatacattgtggaatggctaaatcaagccaattatcgtatgcattacctcacatacactttatttgtggtgagaacacttagagtatactcttagcaagtatcaagtatataatacattgctgttaactatagtatccatgttgtacaataggtctcttgaacatactcctcctgtctaattgaaattgtgtttccttcgaacaactgatttttttaaataaaaaacttaatacctgtaagttagaattcttaatggtcaccttaggagcctatacaattattcctacgttgttgttactattctgtgtctttttcttttttaacatctttaaaggtatcaaatttttatattttgaaagtagaatttattttttgtcagtctaaaatatttttatgttgaacaaaatgcatgaatggtaaacctagatgcaatcaatttttcaaataaaaaaagtagatacccatgaacatttcttttgtaattgcaaactgtcttgaaaggcagtttcaaaaagagtttagttcctaaattgtaccattactcactgcgttaaaatgcaacattcatttgagcgtataaccttttgatcaatttgtttttgatgtcttgttccctgagagttgtctcaaatagatacatataaatatacacatatctcagattggctctgagaaatgtcttgattcaaacgttcttgattctaagattcatggtacataggaactgtatggtgacaaccttgtcagcctatctttagagtagctttggattctattcagaacatttcccaaagctattctgctatcaagaatataaacaggaatagtcaagggaagctttttaaagggcaacattttcatgtaggcatttttctcacattgaaaactagtttactaaatgcagtgtattaccttctcattacaagaagtctttcacattagtataaatgcatatggcagttgtgccagaaataaattgcctctcaaactagcacatggaaagaagaattctgagatttagcacatatgtagcttttaaatagtatactctgtttcaaacattatgtgttagtccacgttctcttcagccattttcagttgcatttttactttatattcctttgtatatttatctttgctaatcattgtcctgagattcctttagctcttgaattctacgtttttaattaatagaaaactttctttttatttttcccccgacatagttgttttctagaaagaaacagttataggttataaatccaacactttagggccgacttgaacatgcatcaaagctactagaggacttgtagaaatacagattgaatggtcccatgcctagagttttacattcagttacagatagggtaggacctgagaattcacattgctcacaaatttccagttgattttgatggcattggtctagagaccaaaccctgagaaccattaaaaaacaaacaaacaaaaacaaacaaaccaaaaaaaaaactatatacagagattttcttcattggcttttgccactgaagacatttagatgaagagactccacaaagtgtaatcatttagttatgagaggggcctgataatttgcatttctatcaaattcccaggggatactattgttgctgattgagaaccacacttggtgaaacactaattaaaataccattaaaaagcaaaaacaatttaggccagcaaaacctcctaaagaatgaggcctaaagacttattttgttttatttttgccagaagcttcttatgggcaaaattatcaccaacagagctgaggttcaaacttgtgttcatagcaagcaaaagggataatttggaaaaaaagctgaggttagctttgtggttggtttgggagtgggaatgagtagggaggaagaaatttaaaaaaaaaaaaaaaaggaagaagccaaatattaaattgttcacagggcgaaaaaagagaaaaggagtaactagaaatatcttagactggttcggcaagtcgggtccctcgcagctaacagtggtcccaccctctggagtttatatgtttacattctttttttttttttttttttttttgagacagggtctcactctgttgcctaggctggagtgcaatggtatgatcacagctcactgcaacctccacctcctgggctcgggtgatccccccaacctcagcctcccaagtagcagagactacaggcaagtgccaccatgtccagctaattttttgtatttttttgcagagatggggtttcaccagttgcctaggctggtctcaatctcctaggctcaagtgatctgcccacctcagcctcccaaagtgctgggattacaggtgtgagccaccgcgcctcattggagtttgcattctagttgggaaaatagccaataaatttgtgacttattttcctttaaaaaaaaaacttattctggctattgtgtgactataggatatggaaggtgcaagagtatgaggctaacaccctgttctaaattccgtctcctctgagccttgttctgtcaagaatctcctccttctatactttttaagtcaccttcctactgatcctttgctgtcagcttaccactctggtacccttcattttaacaaacaaacaattgtccaagcttaccggtgctgctccttcacccctccacctgtacctagtgtcaattctctccctcttctgatggccaaactttgtgaaactgtagcacagctccatatgtgttcctgcaaaggacatgatctcattcctttttatggctgcagagtattccacagtgtatatgtaccacattttctttatccagtctatcactgatgggcatttgggttgattccatgtctttgctattgtgaatagtgctgcagtgaacatacgtgtgcatgtatctttaaaatagaatggtttatattcctttgggtatataaccaataatgggattgctgggtcaaatggtatttctggttctagatctttgaggagctggaagccattatcctcagcaaactaacacaggaacagaaaagcaaatatcacatgttctcacttaaaagtgggagctgaacaatgagaacacatggactcatggaggggaacaacacacactgaggcctgtcggggggtggggcgaggggagggagagcattgggaaaaatagctaatgcatgctgggcttaatatctaggtgatgggcaatagcaaagacttggaaccaacccaaatgtccaacaatgatagactggattgagaaaatgtggcacatatacaccatggaatactatgcagccataaaaaaggatgagttcatgtcctttgtagggacatggatgaagctggaaaccatcattctcagcaaactatggcaaggacaaaaaaccaaacaccacatgttctcactcacaggtgggaattgaacaatgagaacacatggacacaggaaggggaacatcacacaccagggcctgttgtggggtcgggggaggggggagggatagcatttggagatacacctaatgttaactgacgagttactgggtgcagcacaccaacatggcacatgtatacatatgtaactaaccttcacgttgtgcatatggaccctaaaacttaaagtataataataaaatatatatatatatatctctaggtgatgggttaataggtgcagcaaaccaccatggcacatgtttacctatgtaacaaacctgcacatcctgcacatgtaccacggaacttaaaataaaaattaatcatagaactttaaaaaaagaaaagaaaatgtagcagagctgcctagctcaccttctttacccacagctcacttttcagtccatttatctggctattactcctaccgtgccaggcaaactgctctcactaagaaaatcaatagcctaccccctgccaaattgcctgactcagcttctccttgtaattttctcctttagttctctaacaccctcttccccaggttttcacctgacctgtctccataggacatttgagtctctttcctgatgattcatcctcagcctcttccataataagtatggctgctccccagatcctaccctcagcacttcttcactttccatgccacatctcttctgtgatctcatcttcatccacggctctaattagtatctataagcagatgactctcaaagcatatgctgcctatgtacccctcttggccattctacattgacatctgcaactccccagtgaacttctatatttagaccacaggactggtacctgctgataagcacaggtagggtgtactgagtagtgttttctctatttggttgggcttttgctaaagcagttgtcaaatattttgagtcttactcatggccacagacattttaacattagcatgtcccaaactgaaatcccctactgcctctattctctatttcagaagatggcaccaccatctacccaattatttaagctagaaacttctgattctggtgagacttctctcttttatgcatatgtctacactgacacaaaagactgcaaattttacctcctaagtctgtcttaaagcagatttttctctatgattctctatggtttcaggcccttatcactgtgaagtcaagcatacctgattcgaatcttgtcaccgttggcaaatttttaaatctcttctagcctcagtttcctcataaagttttctgtttcttagggtgactaaagggcttaaatgagattaccatacagagagtaaggtacataaaatgcaattaataaagaatagtcactataactgctgatgatgatgctattactattcgtatcctagaaaactccggtaacttgttcactggtctttctgcatctagcatcacttcctcagccagagttatcttctgacatgaaggctgatgccgtcacccccatactcatgtttgaaattcttcaatacctttaagataaattcccacctccttggtgtagcatgcaaggtcacacatgacataatctctccaaggccccatttcttccactctccttgagtgatatatgtggcagaaaatttaaggctgcctggatattatccaccttacgtcccaatacttccatctgccgcaaagaccttctacccaacttcccatcctcaacgaattcttattctttctttaaaaataacctcaaacttcagactagacctctggtccatagggcattacaaatctctcagtaagttgtacaggatgaacacgccccctaaaactttgtttcagatatttcaatttttattttattttattattattatactttaagttttagggtacatgtgcacaatgtgcaggttagttacatatgtatacatgtgccagatatttcagtgttaaaggtttaataatcacatttacagaaaaggaattagctacaaaatggtggcactggtatacaagtatgtaaagatacagtgcttacaatttaggattattgttgtcgatgttttaatattaaaatggctaatcatacagcaaagtcgaaagaaatttacggtcaacatctgtatacccagcacctatactttgccattgaaattttactatacttgatttattacatattcatctatccatccctctttctgtgatcaatttttaatattctaatactcttacccttaaataataagttatcttttcaaaaaataatgtgtttttacatagatgaagcaaaataaacttgcccttgataaaacaatatgcactgtagtgccttctaattcagtgcattgaagtatccattaacaatataaccagagaatataaaacatgtttattaatattccactgtacctgattagatatagaccattaggaagagttattataattaagaatctaggtttgtcaatatagaaaaaaacctgtgttttttatcccactggaatgtcttgtgaggaatattgttcccctttttctaaaatttaactttgacctttattttgttaatgcaccatgggttaagccacactacgacatgtgctaaatagacctggaagttttcaaactaggtttttaaagtgtatttgacattaaatcttcataacaccttattgattaatttaaatccattaccatggtaaggaaaattcgcagacaggcaggtgaaaattaaaatagaaacaaaacaacatggtaagcaatccttccccccaagccaatcagcatgtagtcagtgtgtccttttaaattagcaaggcgcagcttcccataaagtcccagcttgattttatatgctgcaatagtattgctaaaataaaggagaaggcaacttttctctataatttttttctagaagttttcacgcagcttagtatactgcaatgaccacattactcagttccagaattagcagcattccattgtgaatgacttaattcacattgtgattactcatttaacaacattcttgagggtttacaatgtgcaaagcattacattaagtcgtgtgtggcagaggttctcaaatgcagatgatctgtgaagaagatttcctcaataagcagagaaatgagaactataaggacagaaagagagagagagagaaagagaaattatttaagcttgtagcttgtcatcctcctttcttaggacagcctaccatttaggctgagactatgtctttctgattatttcttgtggttgaaataccccttccttaacaatatgatggtaacagtggatggtaaatcttgttttgttttaatagtttacctggcaaaagtatcattttatgtctgtatcagttatatataatagtatatcagtccattaccaaaccgcctcaaaactcagtagcttaaaacagtaggtacttcttgagttcactaatttgtgggctgatggtttacattgggtagtttatctgctctgactgggctcccttgggaatctggagggtagctgagagcttaagtgtctgaaagtggctgggtcaacacagctctatcgctcacatcttgaacatccctccagcaggctaaccagcccgagcaagtcctttttgtgaaggctgaggtgaagagtggaagtgcaaacatgtaaacaatttgttgagcccctgcttccattaagcctgcaatatccgattggctaaagcaagttttatttccccctgtggtaggcagaatcatgggcccctcgaagatgttaatccccagaacctgtgaatatgctgtgctccctggcagtagggaattaatattccagacggaattaaggttgctaagcaggtgactttgagatggggagattttatggactattcagatgggcctaatctaaccacagggttcatataagtgaaaatggaagcaggagagtgggagtcagagagatgaagatagcccctgctggctttgaagatagagaaaggggccattagccaaacaatgttggtagcatctaatgctggaaaaggcagggaaatagattgtcctctaagcttcttcagaaggagtatagccctgccaacactttcattttaatccatgaaacccatttcaaacttctgacttccaaaactataagataatcaatttgtgttgttttaggccagtaagtttatggaaaattgtcacagaagcaataggaaacaaatatacgctccattgttcaatcttttgaataacacatatactattatttacttaatgtttttcttaaaatcagctcattttgttttctgcttttagccttaagtgataattcccacaaaactgtagtctgatgttgcagtgtttttttccttaatacagataaaactaaatgaatattaaaatttaaactataagctgtttatctgtgtaacatggtaaattggctccctaccactactgttcagcaaaccacattttgggaaacagcgatttaggtggttcaaaggagcaagtgattgtgcaagaacaagaatttattagagaaagaagcatttggccaatgggtagaattgttggcagacaaaggtagaagagaaagacaaattattcagtatggctctagcgaactctttgcacttttatcacacaatctgaagcttgctaatcttgacatgtcttaatgttgttggattgctcattaaactggctgaaatgttcacaaagactctcacctgtcttctggcttaagctgagatttatcacacttcttggaaacatcttctggtctccagatctccctcagctaagctatacagtcagtctgttctgtaagaaagcccaaacttctctgcagtgttcctcagtctttttgatatcatgatgaacagattaagttgatgtgttcatcatgatatcaggtaagctggccgaagactctaagctgcctaaccatcccagggctgagagggatcgatatctgaagtacctataacccaatcagggcatgtgccttagcatacccattggaaagccctgttttagagcctttatcagctgtgaacttattgaaggcaatgattttgtcctgttaatcattctattcataattttcaacaagatacgtggttgttgttaataataattgttggttgaaatgaagttaaataaatagcaattgacttttccaaggtgacgcattgcacagatttatttatcttccctttgctgccctggagtaccagttgtatctaccaataagcttcatttataggccagcctcatcttagtttctgaattagtctaagtggctctggtagcgcatcaaaaatcttgctttctgatggtctttgtaatttgaattctgtgacttacagacttggtattcaatatgtcaggaataaacctggggtgtgcccaaatggtttgaaaaatcccagccttcctgatttcctctcttctctttctcccctggccaccctaatagtctgatagtttttgttatttggatactcctaaactcttggcaatttttcttacatctgttctctacaggctgtcacaagtgagtggaggcaggatggcatgggctgcagtggaaagaccaagaaaataagttaaaagccctgggttccagtaaatgctctgtagtgggatttagggcaagtctcttaacttctctcagcatcaatctccgcatctgtgaaataagattaatgacacctgtcttgcctatacttcaaggttgttttgaggttcacatgcattttccaccccatatagcctataaatctctgatgcctacagataacctataatgttctccagtaagtttaatatttccaggattttaaaactcaatgactagcactgctctgatctaacataacatattgtgtcaatatgtgtgggagtctctctggttgatgttaatggaagtttgtatagtttacctaaaatagaataaagctataatattaatatatatcatcgatgtgttttaggtgatttttttcaatataaaggcaattttggttcaaaattaggtagaacatttaatttttactaatttacaaataaaatgataacatcaaaagggccccttcttttaaagataagttgtaactctcacattgatagtaatctgtcatttaggacagggaatccatgtagtttgaaaattcattggcatcatggagctaaaacagtggctttttaaacatgtcgatttcagttttctttgttttacaagtcaagtagtgatattactgggtacatatgaagcatactgattgaccaaaaaatagtaacaaattttgtaaacccttcacttaaccattattcacctttcccagccacataagaatcctttctctttgtccttagattaattgcctttctttaaccttttcaattctaagtccagacaagctgctgtggttctttaaaaggccacacaaaataagtattgtccagtgctaacactctgaaatgtgatattgtaattactaccaagtgaacattaatcactactagattagaatggaattacctgttatattcacattaatagcaaatgagctttccctgattgatgttgttataatgaatacaaaaggaattaatagtgatctggcactcaccaaaagaggggtagtcattaaggacatgccatcaaaaggcgggtaatactttacaaaaaacaagtattaattaaagtaatatcacaacgaatgcctattgaataacttatatccacattacaaagatattatatggttgcgattaatgtgattgcaatacattttgtaaaaattaataatgactaaccctttaaaatatttaggaagcagatatttgtttatatttgctaaatagctatgccaactctttagcttttgtgagtgacttctagcataggaacagtgatggataatatgaagcactatatataataactcatcggccgggcgcggtggctcacgcctgtaatcccagcactttgggaggccgaggcgggcggatcacgaggtcaggagatcgacaccatcctggctaacacggtgaaaccctgtctctactaaaaacacaaaaaattagccgggcgtggtggtgggcgcctgtagtcccactactcaggaggcagagcttgcagtgagccaagattgcaccactgcactccagcctgggtgacagagtgagactctgtcaaaaaaaaacaacctcatatatttttacttgaaaacatacattttgcctttaggatttttacttgttagaatatcctaaaggacctataattgtaaatgtaaaattgactaatttctgggttttaaaaaaaagtatttgaaagctgatctgctgtgaacattgaaccagatgttaagaaaaatgctagtaagaaatgagacttgggagcaaagaagcagaactaaacttttcatatatggtttctatggagtaattgagaacgtacatattaacagggatacaaagtcaggccctctcattcaagatgctttctgtctttaaaaaaaaaaaaaagtaatttttgaaattttctgtggcaacagtcccatagcagaaagcaaagagttttgaattaagtgatcagaatatcattcttataattttactacactgaacattatttagaaaattttgaatgatattaaaaccgctataaaacatacttgcctaccataagacttaggatttaagccagattaaaataaatatttatttagaaggatgtatgtaagaactggtgaaatataaatgaggtctgtatttgagttaatagtattgtgccaatgtcagtttcctagctttgatgataatgtactatgggtatttaaaatgctatcattgggagaagctgggtaaaaggtgcgtgagaagtctctgtactatatttgcaagttttgtggtcttaaaccatttcaaagtaaagttattttagaaaatatctaaatatatattttagaaagtattatctttttctctgtaactagtggctaattagctcagtctgaaagagtatgtagaggtggaactgctaaatatatttctgatctagacttacttgatgatgcttgaattagtaagtgaatgttatgtgccaacatatgctatgatacatataaatatataagattaaatgataggagctaattatttcttggcatgttgcagtgggtccatttaaaactgtttatgtaggaaactactgtaattataaaaatgagcacagcccaacagcccagtatattagttgaaatataaaaggcgttgtgtccaagatttgaaatgccttacaataagcttggcacttacttaccttcacacaaagcagacacattttattgtgattttagtgttccatattatatggtacagtaccaaaggaaaactctaaaatatgtactcaaaatcctgatgtgcccttctttccaaacaggtggcaccacaatgaatataacctttagagttaatatctgaggacaaacccagcagttacaccagcatgatttaggtcctgctgttacaattattattattgtatttatttcacaattaagttgcagagttgagctcgatatagttccagctgtggcttttttttcaactgtctcaatagttcatagatatggccaaatgttcaataatagtgaaagcttatagtccacatattatttctgtagcaccaattttatgtgaaaaaatgatttatctaaatctcagagaatttccataactagttttgttatacatctacaaaactaagttaaaagaacagagcagactttttaaatagctagattggccaaatccacctcattatcatcaagaagatactgaaacaccgtgtttatacaacaagaccaggcattgtaaaagaggaggaaaggtagagacaaaatttatttagccctcaggaatctttcattctgatagtgtaaatttgacaactttagagggacttattaacatgtatcttatatatcttgataccgaatatatattttgtgattgcattagagccatgaaatattacacaggtcatttgaacatagcattttcatagagaaggtgacatttgcaaaagattaggagaaaagtaactacgattagaaaatcgtagttttattttgtctcttgagaatgaattgatgttaattttatgtctgatttggccaaatacgatgtggaatttgctaaagactgaaaaaagaagagacatcaaatagagggttgcaagttaacagaccatgttataattaaatgagggaaaaaaaagtagagttgttaaactcccagagaagtcatttccccttggtttggtgcatttcactttggtggtgaagtaaatgaccatatgggcacttttctagctctgtccgcaggtagcactgggtatttgtggacaaattacctagcttttcatagcactagtttccttgttgatagacttcagaattctaaattccattttacatccttatttctatgtttaacttaaagataatcctttgcagccgggcacagtggctcacacctgtaatcccagcactttgggaggccgaggcaggcggatcacgaggtcaggagatcgagaccatcctggctaacatggtgaaaccccatctctactgaaaatacaaaaaatcagccgggtgttgtggtgggcgcctgtggtcccagctactcaggaggctgaggcaggaggatggcatgaatccgggaggtggagcttgcggtgagccgagatcgagtcactgcactccagcccgggcaacagagccagactctgcctcaaaaaaaaaaaaaaacaaaaaaaaaaacaaacagatcatcctttgcactggaattatcctgcagtggaggatagtaatgaaagtgtagactctgtttctgaacactagctatgtcactttcaaactgtgtgattttccttcaagtttctcaatcactccaggtctggtttctaaatagaggaataggagtagagattaatattgtgaagattaaatgagaaaacttatataaagcacttagtacggtgccctgcatattgtgaaggcttggtatgttgttagtagattcattttattatcattattaataatactgaaccctggctgttgggggaattggttctatcctcctgtctcatagtcaaaataggttaaagggccttctatctcttatttctggtggtgcattataattactaatagtaatgtgcttcatttgtatatgatcctttatagtttacatggcgctgttttatgtaatcttactaaaatttcaaaaataattttaaaaagccagaattcacaagaatgtgactcggagaagaagtagatgtttttctaagtagatctttcagtttaactgattcaaattttctcatgtttcatatacatgattatcatgtcttttgataaacagaatgttaaccagagtacaaccttgtatgaacatatttattcagcttagaaaagatccagaggtacaaaatctagatcccagtgtagaagttagcatacacagtacaatttctagtatgtccataaacaatatgttaaagtattagtttgagccatataggattgccaatatctgagtgttatagagctacaaaattagtaggaaattttgttgctttaacctaatcattaaattagaattgtgtgacttaaagttacaaatggtttccgaatattttgcagtaaaaaagtagtgaggaaaataaatataaatactaaactagacctgggaaatttaaggctataaagaattctagcttacagagagaggagtctttgtttgcaacctcccactagctaaatttaaattatcacaaatttcatcctctcctttacttaacccttgactcatgcaactagtcaaatgtctttttcttgctaattttttctttccatagatcacttatagggagttctggttaaaaatgatgtctctttaaccttcactaaaatgagaataggggaattaaaatgatatttaccacaaagagaaaaaaatctgggaggaaaaacaataaaataaaaaagataaaaaatttaggaatatgcagagaatggaggagttagcatatcttggaaacctgaattccaagtacttagaacttgggaagtcctagaaatgtgaagcaccagctactgcagaaggcagagatgaatgtgaggtaagatagtgagactgtgaagagaaatcattcagtaaaaaatgcattatcaagccaactgccactggtctagtggagtttaatcccactggggaaattctaaatggattgaagacatgtgtttaagagttagttattctttcaaaggggcaagggagctggggtatttatacacaaaatcctgctagtcattggtttaggactgcttccaacgggggaattattttcctagcatttctggcataccaccttggcaagaaaaattattttgtgtccagagtatgtctaaagccattagggaaaaaaaatgtggatcctcatagttgaaagccaggccagtctgcactaaagtggtaaggatgttttcttttagagatacaggtctaagaaagaaatctgaaggtggttacctcttatgcaagaatttaatttgatggattcaaggtgtgttggttaagagaaatggggaagggttgcttctcatgactgcggcacgattctactatactaaatttttcttttattaagcagcattgccttatgcaatgataggaaacatttgttatatgtgaaatcacttttatttttattttttaatctattcctattcttttcatttttttaacttttattttaggtttgtggggtacatgtgaaggtttattacataggcaaaccggtgtcacaggggtccgttttacattttatttcaccaccgaggtattaagccaactactcagtagttatcttttctgctcctctctctcctcccggcatctcttttaaaagaaaataatttttagcaattctttagaataagtcttggccacctaaaggtttccaggactctagttcagggagtatttatctaagtcagtagttcttaacctgatataatttcatccccagagaacatttgacagtatctcaagaaattcttggttgtcacattgggggcggggatactgctgtcatcaagtgggcagaggccagggatgctgctcaacatgttgtaatgcacaagacagccccccacaacaaagaattatttggtccaatatgtcagtagtgccaagtttcagacatcctgctctaaatcaggactgtgatgtgaattctctgcgatgatgaagatattttatatccgtgatgtgcagtactgtagcatatggctactgagcaattgaaatatagctagtgtgactgtacaccaggtgtgatgttccataccgaggaaagaagtagaaataagatatagtctttgaagtcagagctcacaatctagtagcggagacagatttttaaaaattacaatattttaaaaatattgcaatagaacatggtaatgttagaagattaataacatgctaaatttgaggcatcaggactcagacagacaattaaaaattctctgaggtgaatttccacccttagctcagaatactgtaatgtttaaaagctgttttctatacacacacacacacacacacacacacacacacacacacacccctttaaatcttttatcatgtaactcattgcttcttattttacccttttgtcagagaatacatataaaatactggaatctgatgggacattctactttatttaacaatgctattgagtttctcaaaatagtttcctaagaaagtctattaaagtattgattttttcataaaggataatacaaatggcatgagtctgtttaacattttaatcaagcttaaaattagtcttgcatttgaaacaaacttgcccagagaaattgttgagaaacttaagagaaaaacatcataaaaaattgatgggccagccaggctgtgagaatattaaaatccaaatctaaattatggttaaccattgtcacatctttctttgaagcttaagtaactcgatattccctgtaggatacccagtgattcaaagtgacacatatactgtcagctcattttccttcccagcatgctggtacaatttgtatccatagaaatatatggaaaaacctattagtcttgagtgccagaacctaccaaaaggaatctttgtcatctacaaataaattaataacataagataaacaatcctattaagttatactggcccgaaaagggaaaaaagaccagtttatgaattgacaaaagaaggtaaatgagattagccatatagcaaccactcagataataatgtgttttctctgtttagtaaaaaagcatatttgagagaaaattttcccttatagaacaattcttaataatatacatagatactcctttcctgggatgtagagtttaatcctcccctaagcccctccatgaacttggtaacttacttccagataatagaatatggaaaagtaggaataacaatggagaagaaaccaggcaggcaccaagttaactaagtagtcaagtataacatcgccagtgataataatattgatatcatgtctcctgtgatatgatgtcatgaaaaggacatgttatctctctggtattcttccccaaaacctgtaacttcttctaatagggaaaatacttcagtcaaatcttaagagacttctagaatatacctgactagtcctattcaaaagtttcaaggtcatgaagaacaagaagaaactgagagactgtcacagactagaggagaccaaaaagacccaaggaccaaatgcagtaggagattctggattggatcctgaaacagaaaaatgacatgagtggaaaaactggtgaaatctgaataaagtctgtagttttgttaatagtgttgtatcagtgtttgtttaaatgtttagataaatctctcatgcgtacagaagagttatcattaggggaagctgtgtgtcaggcacttagaaaactttcagatacataggtaccttttgtaagtaaaataatgaattaatgggtcattttatgtctgtattttatataaggctacatttctaaagagacaaaattgtgagtcccataaaaatataaaatgaatatgtgtaaaacattttattagatcattaactgatgaaggaattagtaagatgttagttacagttggttcaaaggagagtctgaagaattggcatatatatatacgtatatatacgtatatatacgtatatacatatatatacgtatatacgtatatatacgtatatacatatatgtgtatatatatattttatatatatacacatatatatataaaaaacactctagaatgctgataggaattttataacagatacaatactgatcactaactgtagggcaggaatctattgcgttccatgagaaaattttactggcatctagtgaacaagaatcatttgtgtcaccatcagccctccacaaattgacttttaaacgtacagaattgcaaaatagcataaccaaagtctaaggtacagactcttagataatcagataactcctaaggttttcctaaggaattaaagggaaagagacattctcagattaaggaaaacaaagaatttcttgctagcaaatctgctcttaaagaatgacaaaaagacattctctaaacagaaaggaaattataacgaagtcttgacatttcagaaagaaaatagtagaatgggtaaaaatgagagtaaaataatagactatcctatttaccataagtttgaagtgaaaactttaacaccacctgatgtggttctcaatgtatgtagagaaaatacttaagagttatattttaaaagaagacatacctaagtggaagtaagagtccttctacacgtcacctgaagtcaattccagtagattgcaatgttaatgcgtatcgtaatgcctggaaagaccactaaaaaactatacaaagtgatacgttaagaaaatacaacaaataaattttgatggaatcttaagaaatgttcaaataacccacaagaaggtaagaaaaaagaaagagaagaatgagaaataaagaaaacaaacagaaaccaaataaggtggcagattgaagccctaatatatccataattaccttaaatgcaaatggtctaaatataccaattaaaagagatttagctgagtggattgataaaagctgagcacacaatatgccgtctaaaagaagtttatttcaaatacaacctaggtaggttaaaattaaaagaatcgaaaaagttacattatgcaacaattaatcaaaagaaagcagcagcagtaatgttaatatcagataaagtaggcttcattgcaaagaaaattactagtgacaaacagggacattacataaagattaagtgttaattcactgggaagacataataatcctaaatgtgtttgcacctaacaacagagcttccaaatacatgaagcaaaaatgaatagagctgaaaaaagaaacagacaaatccatatttctagttagggacttcaacactcctctctcttcagttgatagaactactaaatggaaaataagcaagggtaaagagaactgaacaacaccatcaaccaataggatctaattgaagcactcctcccaacagtagcagaatacacattactttaaagctctcatgaaacattcactgatataagccatattctggactccaagcaacttcagcaaatttagagaattcaacttatatgttcccagaacataatgaaaccaagctagaaatcaataagagaaagacaaaagaaaaacctcaaaacacttggaaatgaagcagcacacctttaaatcattttccccaggtcaaggaggaggttgcaaagaaaaattttttaaacacaaagaactaaataaaatgaaaataaaacatcaacatgagtgagattctgaagcaaagggcaagcatatctactgtctatttttaaagattaagcttccttaagctcagggtttctctcctgtgatgcaatccactgtgtgtacaggtgtctcctgaacttctttgggattactctgtgggaactggctcaataaaatgttggttctttgactactgctttgctgtgagtaatctagtctttttctctggcaaaaaaaaataaagtgagatgtcataaaagcagtattgagaataaaatgtatagcattagattatttagttagaagacaggaaaggtctaaaataaataaatgagcctagagacaaaaaccatcaacaaaatattaaataacatgcgtcaaagtttaaaaaaagagtgtcataccataactaactgggatttagtattgaaggctggctcaacatttgaaagttaattagtgtaatctaccatatcaacaaactaaagaagaaaaaatcatatgattatattgattgatgcagaagcatctgacaacacccagcatccattcatgataaaaactatgagaaaactgggaatagaggataacttccacatcttaataaagggtatctacagaaaactacagttaatagcataattttaataatggaaggcttaatgtttccacccatgattgctaattagggaaggatgcccaatttcactactcttttttaacatagttctggaagttccagacactacaataaagcaaggaaaaacaataaagcatgcatattgaaaagtataaaataaaattatttctatttgtggatggcatgactgtgtacgtagaaaatatcaaatattctacaaaaacaaaagcaaaaataaccaaaaatgctcatggagctgagaagagaggttaacaagatccaaaaatacaagatcaacacaccaaagctagtcacatttttatatacagatgctcctcatcttatgatgggcttacatttagataaacccatcataaagtcaaaaaatcataaggcaagccatcacaacttacggattatctatgttggaaatgaagatgtgaaaagtgaaattaaaaacacaacaccatttataattgcttatccaaaaatgaaatacgtaggtataaatctatcatacatgtacaggatcggtatgtagaaaattataaaatgctgatgaaaggcattaaaaacaacctaaataagtggattatatggcatgtttatagactggaagagtcagcatagcaaatatgtcagttcttctcaaatcaatctaaaggtttaatttagtttctatcaaaatcttatcaaggatttctgtacacatagacaagcatactctaaaatctataagaaaagtcacaggccacagaataactaaaacagtcttttaaaaaggtaaataaagtgggagtaacctctctacccaatattatggctaacaatatagtaaggctatcaatacagtatgatgttgctggagggatagactcatagaccaaatgaaacagaatagagaacccaaaaacagacccatgcaaatgtgcccaacagatttttgataaagttgcaaaagcaattcaatagagaaagctcaccttttcaacaaatggtcctgcagaaattggacatccctagagtgggaaaaaaaaagaacttcaacctaaatctcacaccttgtaaaaacttaattcaaaatagatcatggacttaaatgtaaaacataaaactatcaaaatttagggaaaaatgagaaaatcttcaggctctagggctagaattggcattgaaagcatgatccacacacagaaaaaaatcagttggactgcatcaagatttaaaacctttgcactgcaaaagacctgtgagggaggatgaaaagacaagctacagactgatagaaaatattttcaagccatatagccaaaagatggatgtctagaatatataaagaactctcaaaactgcaaggtaaaacaagaaacaaacaatgcaattaggaaatgggcaagacacatcaagaaacgtttcaccaaaaaggatatacagatagcaaataggtgcatgaaaagattatcaaaaacattagccattagagaaatgcaaattaaaattattatatattcctacacatctatcagaatggctaaaacaaagtagttacaacaccagatgctagcaaggatgtggagaaaatggatcattcacatattgctggtggaaatgtaaaatggtacagccactgtagcaaactgtttatcaattttctgtaaaactaaacatgcagctaccatacaacccagcaattgcactcttggacatttatcttacaacctgtacaaaaatattcataccaccattattcattatagccaaaaactggaaagaacccagacggtcaacaatgaatggttgtacaaactacggtacatccatacataccaggcaatactattcagcaataaaatggaatgaaatatttatacatgcaacaacttttagatcaatctccacagaattatgctgagtaaaaacagctcatctgaaaaggttacataatgaatgattctgtttatatagccgtcttgaagtgacagaattaaagaatgaagaacagattggtgattgcaaggagtccgggacaacaggggaaagagagagagagagatggatgtgactccaaaagggcaacacaggaggcatccttgtagtgttggaactgttctttaccttgattgtgtcaatgtcaatatcctggttatgatattgtactatatttttgcaaggttttaccttcagggagacggggtcaggggtatactggttttctctgtattatttctcacaactacatgtgaacatacaattatctcaaaactaaaagtgtaatttcaaaaaacaaataaaacaattcagaaattttaagacttcaacagtcatttatctcatttgttattttactgttgagaaaacaggcacaaagaaactgaagtgacttactttcatgcttcacctaagtctttttttcttttctccatcactcagttaagagcttctgtaatacagaaagtatgtcttgtattcttttaactcccatattacttcaagcaatgttgaacacatgttaacattgtaaaagttgttgtctgagtaaatgggaaagatagaggtctatgtctatatgcaaatactttgtattaacatgtttcagtctgatataactttccacacagaaagtacaaaagaagatctgttcaagttatctgatttaattaagatagtaaaaagaaagctgataatttagggggtcttatttgattgtttttaattttacttattttccactaggtgatcattttgatgattcaaaaatgaaaatttacaaaaaggtataaaataaaaattatttctcctacctctatgcactgtcgaatcaattcccctacccaccaccaatcagtattgtcagctgtttgtatatccttcaggagatatgtacgaatttcaagcgaatatgcataagtttatgttatgtatatgtgtgtgtctgttttctatatatatgcatctttacattaatggtagcatacgatacacattttcttctgaattatgcttctctctcaacaatgtttcttggacattttcctgtatcagtacataaagaatgtatttgtttcctatgactgcaatagtgaaataccacaaactggatgacttaaccaaaagaagtctgttgtcttacagttctggaggatagaagtctgagatcaaggtgtcaggagggttggttccttctgagggctcggaaggagaatctgttccattccattcccctagtttctgatggtttgttggcaatctttggtgctccttgtcctgtagatgtctgccttcattttcacatggcatgccccctgtgtacgtgtctgtctccaacttccccttttaaggacagagtcatattggactcaggcccaaccaaatgacctcattttaagttgattatctctgtaatgaccctatctccaaatagggtcacattctgaggtaccaggggttaggacttcaacatttaaatttggagaaaatttggacagaattcaacccatagcaaagaacttaaccgttagtttaatgactacatattgttccattttgtggatgtatcataatctatttaagcagtgctctgaacattttattggttttcactttcattgttttgccttaatattggtgtctgtttcatagaatagatttatagtattttaggcttatcaagattttatttaaatcttggaatttaaattccctgtaaatttcaagtgccttgaaggcaagatatattgaggaggggagacttttaaagttcatatgaaataataaataatcgcaagtatctcaggaatgcatgaaaaataataaatgtctctgcatcaataataagggagggggcttgccttatccaatattaaacttgctgtaaagctactgtaatccaaatagtatagtattagcacaaaacaagacaagtagatcactgaagcaaaattgagagtccagaagcagatcagattgtttttggaggccgggcatggtggcttacgcctgtaatcccagcactttgggagtctgaggtgggtggattacctgaggagttcaagaccagcctagccaacttggtgaaaccccgtctctactaaaaatacaaaaattagctgggcgtggtggtgggcgcctgtagtcccagctacttgggaggctgaggcaggagaatcgcttgaacccaggaggcggaggttgcagtgagccaagatcgcaccattgtactccagcctgggcaacaagagcgaaactccatctcaaaaaataaataaataaataaataaatagatacaaattgtttttggaaacattatatggcaaatgtgttattttaattcaaggaataaaggtgttttattcaataaatggtgccagcactctttgcaattcctcttagaaaacacagattgcctcctagcttatgcaatgtaagaatacatttcaaatgcattaaagttttaaatgtaaaaacaaaaattcttggaatgaggaagacgttttctaaacaagacacaaaactcaaaagctataaggaaaaaatataccttgttactgcttaaaataacagaagacaaagtcaaaagaaaaacagcaaatagagtagatgtattcgcaacatgtgacataaagagatgcatatacctaatatacaaatttctcctacaaatttgttaattaaattaatattttttaaaattcaaacaacccagtacaaaactggccgaagtataggaatatgcaattcccagaagaggatatccagatagctggaaaaataaaactatgataatatgcttcctcatagtagtaagggataggaaaataaagaaataagacaccatgtctatctaacaaatagacagaaattaagaatgataatttttaatggaagagagcactctcagatattgcagatgaaacgcaaattgctgtggtctttgaggaaagaaatgtggtatgatctacaaaaattttaaatgcacttaccttttgatcagtcactccatttctgagaatcaatactacagaaataaaagtaccagtatgaaaggctgtatgtagaggatgtgtattttggcattgtctatgatggtcaaaaagtagaaatcaagcaaatacccttcagtgtggaaattattgaatatgttatggaattatttgggcatcccagaatgaattattatttagtctagttagagctgtgtctactgtcctgaaagaatggtgatgatatctttcaaaaatcaaaacaagtttcaattaacatattccatttttaaaataaaaaagataaaattaatcttatgggattacataaccatgaaggaggaatggagagatatatactaggttatcagtatttgttaccttggattttcaaaggagaatgaaagaggaacaaataatgtatcaagtttcacaaaaagtgaaaaggtggaatataaatattactgcaaatatataaccattgaatatgtatatggacaaggacgataagataatatagaaaactgaatatgttggttttattatgaggtggttggattgaagatatttttgtctccaaatactgttgttttaatatgttgtgttttacaaagaaacatgggctgagcagacagggaagccctgataagcatagtacctgccatgtggccattcaataaatgatagttattgattattattattagagttgtagtacagtagtgcctaccttaatatatttagattgatgcccagcagcattgagttaacccgcattttaaggacaagtgttatagctattatatactaatggtaaacttgagtctgtaactagcactgttgaaggaggacaacagagtaatatgatgtgtattggcctggggatggaagggtggtgcttaaggcacagcagattttcactccagccaggtttccttaggacctctccaatgaacaggatacctcccttcctgttctttctaccctcccaccccgttttttgctttttcagtttcagcccaaaggggaaggaagtatgatgactgactccccatcagtccctgaggtgaactgggattttgggagagtgtggcagctgcaaatttggcttcctggagataggatttttgccctcaatctggagaaagttcctgaggctacagctgttcaagcttgtgaagtaggaactttgatcccttttttcaaaagttttgtataattagcatccaacttgttagacagtatgtggctcattacaagattgccacaaattcatgctgggccgtgtctaagaacagggcaaagggagcctttggaaagtgttatacagttgaccctcaaacaatgtgagggttaggggcgctgagcccaacacattgaaaaatctaagtagaacttttcactcccccaaaacgtaactactaataggctactgttgacagaagccatactgataacataaagagtgattagcgtatactttgcattgttatatgtaatatatactgtattcttgcaataaagtaagttagagaaaatacgatgttactaagaaaatcataaggaagagaaaaatatatttactattaattaagtggaagtggatcatcatataggtcttcattctcattatcttcacgttaagtaggctgaggaggtggagggagaggaggggttggtcttgctgccaatctaaatgctgggcccagccaatgggtataagttttaagtgtgcacatattggtgaacccttacagatcacggcactgtctgttcgagtgtctattttgaaatgtccctatccgtaatataagttgcaaaggagtttgtgggcccactgaattctaccaccctgatcattgtgaagcccattcagctttgtgaagagcttatcttggtactaccttagccaaggtatgataactcagacataatgtcttttctttcatggttccttttttagtgatcatagattcagttctgtaataattagagatttatgtgtcctattagtaattgcatcattctttaaagacagtgtcaaccttgctatacagtgtgattgaagccttgacataacttgggggtttgttggcattttgaaatcccaggccccacttcaaaactgttgaatcagaatctgcattgtaagaagatccccaaaagatctgcatgcacaagccttgaaagagaagagaagccatctaacattcctcacctaagatttgaagaatttcccacttatgcaagagtaggggtgtgatttctcaggcaggatatctaacagaaaacaacacttatgaagtgtttcctgtaggagctaagcaggtggccagaaaatggcaggctacaaaggagaagaatgactaggaacctgagcaaggagaaagtctcaaagacaaggaagtggctggcagtgtcagggactaccaggcagctgaaaaagctaggtgtgaacactatttcttggagttttcagcaagtaagaggttcatgatgatgcctcaaagaatttacagtggaaccagagccaagaagtcttattgtggtgagttgggaattagggaaagtgttatacagttgaccctcaaacagtgtgagggttcggggcgctgagccctaacctcaagtaagaggttcatgatgatgcaatcaaagaatttacactggaaccagagccaagaagtctttttttttttttttttttttttttgagacggagtttcgctctgtcgcccaggctggagtgcagtggcgcgatctcgactcactgcaagctccgcctcccgggttcacgccattctcctgcctcagcctcccgtgtagctgggactacaggcgcgcgccaccatgcccagctaatttttgtatttttagtagagacggggtttcaccgtgttagccaggatggtctcgatctcctgacctcgtgatccgcccgtctcggcctcccaaagtgctgggattacaggcgtgagccaccgcgcccggcagccaagaagtcttatggtggtgagttgagaagtagggaggtggaaataaggaatggagatgaagacatgaaaggaatttgagaaatgaggcaatagctagagaagaatataggaatacacagatccagcaacccagcaagggaagggctagattctgatttcatgagcaaattgcctactaattaaattcacaatatcagaggaaactgttggactcacttactgaataatagctgaaaagtatctttgctttatagagagatcactgtagatgaaagtcatcttccagtggtgagatattcttcagtgtcatctcttcatttttatttctaatttttcttaatttgaattatttcttctgataatgggaatgatgtggtaattttgtctctcctgtaaattattttaaagatttgtacgaactcctttggcaggcttgagtgtgttgtgacagcttggcttagatatgcattgaatgtcattgaattcaaactccttaccaacatagttagatagcccataggcattctacttgaccctttcaaggagatctggagatgcaattgtaggggaaaaaagaagaaaagaattcaagaagcaacaaagtgaaagataatttggcttgcagaagagaggtctttctatcacagtaataataatgccaattatatgtccatatatatatatacgcacacatatatatagtatatatatatacacatataactcagacataattctttcatagttctttcttttgtgcacagattcacttctgttataattacatacttatgtgacctatttgttagtaattgcttcagtttcttaaaagagcatcaccttgctgtgcaaagtgtgattgaagcctcaacatctcttgggagtttttttagaattttgaaatcccaggccccacttcagaactgttgaatcagaatccgccattgtaagacaatccccaagggatctgcacgcacgttgcagcttgagaagcactgcagtatcacacatatacacacatattcaacaccaaagagagagaaagaggtcataagctctcaggtggagactagttccatgtatatatgcatagagagaagaacaaactctaccttccagcaacgtaaaattctactcaatcatgtattcaccaaaaaagaaaaggctttctccatataatgtgtattattcatatattggcactcttcagagctcttcattccaccctaatgttatctttcttagataattcacatgacactttgttatcttccaataatttctgtcattgttataagcgaaattattcaggctttatctaagagagtaaatcaaacagtatgcctctctcattccaattctgcaatattttcattctagaatgtctaaaggagccttgaaagagaggagaagtcacctaaggccagctagaggggatatatagcagggaatggtggcaactccactcctcgtagcccagtggggttttttttttttccaatctgtatttgtatgtgagtatcacgtctatgccgattttatgtgtacatatgtaactcaaatctgttcattgtgctagttagaatcttatttccccctcttctactacactctaccctttctctttcccctcctttggcaaccaagacactgagttattaataagcagattggagcaaacattttgatgcactattgtttgatagatttgttggttcattcaataagcattaattgagcacttgctaagtgttaaacaatgtactaattgctagatttaaggatgaaaatgataaaacccttggcctctagagcctagagtgtagttggggagacaaatgggcaaattagtcacacgacaacatattccttgttaaaacagacagttgtgcataagtctgtatacccagactggagatgactctgtttccaatgttgccctgggaaacctcatgatcagtttaataatgatgtttggggtgagaggatactgagacagtttgcttctagcatagtaattacccatagaagtttggggtctttattcaaaagagtttacaggccacatgagccactgtcttgccttttataggatcacatctaagttccgtgtcatataatggccttggccttcttggctttctctgtgctctttgcctgccaataccctaattattgaagtactgtctcccgcagctcctcaaccatgagctgttcccgatcctcccagcagctatgtttctcctttcttcaaacctctttagctttttatttgtactttatttgtactaaattgtatttagagctttggagaacattcttcatagttgtaattagactgtaaagtcctgagaatgtatttttcatcttcgtagccccctgcagtatctagcagaatgcctttaaacaaatgggcagtaaataaatcccaacaaacttaaattaaatttctccaaattgcatatttaattttatagtggcatttactgataacatacattgaaataaaggccagagcataatcctctctgtttctgaatattatttatttaaatattaactttctaatccaattaggtctttcaatgacactttagatctaaatttatttttgcattgttttaaatgtcatcaaatgattcatctcttgtgttttttaatatttttggaacgaacgtgtgaaaatgagcaagtgtcatcagaatatgatgcttgggtttttttaattcaacatttctttgatcatatatttaaagactttttctcaattcctttctggatgtggcctcacaaatcatttcagaagtcaatccatttcaagatttttttttttttttttgcttttttcacttcacaggaagtcaagttcattctttaaaatgtagcaaatgattaagcaaattcaacgaatgatcttcatcaactccgaggtgtttttcccccttgaaaaatttaagttactattatttttttttctttttttttttttttgatacagagtctcactctgttacccaggctagagtgcagtggtgtgatctcggctcactgcaagctccacctcctgggttcacgccattctcctgcctcagcctcccgagcagctggtaccacaggcgcctgccaccatgtctggctaattttgtgcatttttagtagagatggggtttctccttgttagccaggatggtctcgatctcctgacctcgtgatccacccacctcggcctcccaaagtgctgggattacaggcgtgagccactgcgcccggccaattattattattttttttaaacttcacctatcataaatcttttaaaatttcacctatgataaacttcctctgtcatctggggaattacttaaatgcaatgatggccttcaagtatactaccaggcagcctatccaaatcatgaaacagaaaggctcatagaccaaattaaaatacttgaatcacagagtttattaaaatcacagtgagaagcaaacgggaaagatatgtgctaagttaacacgcttagaatagagtgtaagcagactgtgaagattagagtacttgaattctgcagtacacaacattatatgtcttgtctgtctctgtattgcatcagccttcccaattatggtgtgcttacaaggaccaaagttgacttcccaacaagggagtccaaaatgggtggtgcctgattcagtggcatgtggtttatcagagacacagagacaagaatgcatggccacagctgtaacttgccaaaatagcctgatgactagccatgtaattctcaggcagaagacttacggtgctggaataggtatcacctatggatgcctgaattaagaccttgtgaacattaagtgctcatgtgtatttatttgatcttgaatatttagtgcctcttgtatatttggtctcatgtgtatttagcatattatgaatatttagtacccaggtgcctcatgaatattgggtatcttttggtccttctatccctcactatctatgtttagtacacacatgctctgcttgctaactacttatcttctaattaacacattccaagagccaattatgtgtatctctttccactgagttcttcattcaatgacatcaagttagttgcttgaaatcagctattgtgagagcacttacaccacagaaattggcaaatgctacaattagcgccactgccctcccctagagccagttatttgacatttactagcattccactacttacatggcccttcatgctctcactccgtgtgaccactcaagccttatccctctttactgaactctacaatcaaataaaatatctttgtttcttgcttctggccctccatcaaatggctccctctcctaggaacaatctgtctctcctctatcacctttgtttagctagttaataatcccttttcagacagcacctcataaatagattcctgaacatcccaaaccggatctcctgcaccttcaatgtgctacttcagtacatttgtcttaccctttgccatatggtatttcaattgcccatgaatttgtattcctgtttagatcttaagctttgtgaggtctttttgtacttttttgtacttccgtatacctaccacataataaatatttaatgaaagcattaatgaataagtaagtgaatggagtgagtgaatgagtattcaattatgattcatttgtatcaaagtgataacatatacttacagggaaaaggccagagggggaaaaaataaaaaataataatatattttatgtatgaccttgtgtggggaaaggaacatagggccactgcctggcctgcttcttttatgcaaatcctaatgtaaaatatgatcaacgcctggctgggcagaaatacaaaaacccagtactagtgattctcccaaccagataccagctagtacagatcatagccagatttaactactgtgaagtggttaggttagaggtgacctataaggaaatgacgctaatgatcattagcatcatcttggaagcttaaaaaaatgccccagctgtaccccaagccaatgatatcagacttttgtggggaacccagatatcattgtttttaatctttaatgattccaatttagccaaagttgagtctcaacaaaccaagttcttcttactctcatattctcttcttctcgcatagataagaattaacagccagctcttctacatgtttcttagacacatatattgtttcagtggtaattcgttaacagtgcatatgtcagcaaagcatgactgaaaaaaatatctgctcccacacattctgatcccatcttgacactgcatagctgttggcgaaggcaatttcaacaatgaagaagtgggagaaatgactacattttatgtaaatatgtattcattgaaaatcaaaaggacatatgtaatgatattgtttaagattctaaatgaaggacaatacttaagagtcctctgtagtcaaatttctcagcagtaaaaaaacattgtcttttctttacaactattaaccatatggctgtgaaaatgttattctacaagcctttaagatttgaaatctgactttatgttaatacacagaatttaccacacaatcctgtatgatttctaagtagatttaaagagtagctattgctcaccttttcaacataatggtaatgatggtgcaatgtcaattacatgatactctcatgggcgtgattatatgattgttaacacactgaagtgcttatatagacatagatactgatttttatatgtacatatttaaaacaaacaaggacttaaaatggcctgtaaaagtctttctagtcagtctttctggttttggacagagaacaaataatcccttacagctgttaggttggtgcaaaagtaattgtggtctttgccattgcttttaatggtaaaaaaaacgcaattacttttgcaccaacctaatagttatctacttccatctttaacgggccctacccaagactgcatggtatataagtaagaaatgtaaatgaaaatctcaaatgctagatctgcccaggaggggaccactaatgagagaggaaatgttaacgtcccatatgaactaagctcagcttagcatttacccttcctgctattccgctagagcagtgcttctcaaaagttgacctgtaatggaatcttctgaatgcctttttaaaacgtagctggctgggccccatccccagagtttctgtgtcagttggtctgggatggggcctgagaatttgcatctctaacaagttctcaggggatgttgccggcccttgaatcacaacttaaaaacctctgctctgaagaaagggaaagctctctctgctggatttccccaagcctttttcagattttcaggagacttctgtgcggtagcttgcttccttctttccatactactactactaccactactactactacaaatagcaacctctagcatattttcagtactaaatacccagcactatatatacatcacaaaagtcccttgaggaaggtggtattatcatctccattctgcggataaggaaatagataagaaatttgctgaagatcgcagagccaaatgagactcaaacccatgtaacccatgtctgtttgactttaaagcccggaatcttaatttgttccagacaagctcattatgtgctctgatcttcaccactgaaatgttctgaatatgaggctgagggcagcagtgaggttggaaggagcagcccagaggagcaggcactgtgctggtagaatagtagtatggtggggcctgcactccctaataaaagaaggggacaatgactatttcctccttctccaaggtcgtgctgcctcccatttctctgtctgcctggtaagaagcagctctgggccatgtgtggtggctcacacttgtaatcccagtgctttgggaggctgaggcgggaggatctcttgagcccaggaaattaagaccaaccctagcaatctagtgggacttcatctctaataaaaataaaaaacttagctgggtgtggtggcacacacctataatcccaactactcaggaggctgaggtgggaggattgcttgagcttgggaagtcgaagctgcagtgagccgtggtctcaccactgcactccagcttgggcagcagggtgagaccctgtctccagaaaaacaaaaagcagcagctctgaaaagaggatctagcagtttctatatgcaggagagcatttgcgcaattgttcctggggttgaatctgagaaactcacagtgcacattcagatactatttacaatcttctaggaatagtataaatattgtggccagggcaccttcatattgtgaaacacaaaaagacttcagaccttagattatgtgtcgaaagttaggcaccaatgatttttttttccatttgttcttaagtggcaaatctttacattaacatttttggtacttgtctttagggaaatttcttctctgttctgaatgtatatattgtaattcctcatttacaattttgcctgcaaatgcaagtgagtacagatcatccagttatgaaaatgctctgagatttgagtctagctgtttcagctttaagagccctgacctagactttgaaactgacatggttttatatgtatgtggttggaattaaacccaaagcacatcttttaaaactctgaggaacttctgtgccacagctttcgctcagttggtgagattttactttgaaatttaagggatgagtctagtttatatgcaaagaaatgtagggagctttgcaaacccaatcaaatcctttgtgaacagtgtgtgcatctgtttattttgctgtcattttgagtccatgatcctgtatactgttttgtgggcacatattgagggtaatatcaaataccatgtagaacagatgctgcaggtatcctttccatgtcctcttagctttggggtggtagatgggcacatggaccaagcccaaagtgacagggtattaacaggagcaagactcaaccaataagggagagtagatgggtacaaatctcagctttctctcccctcactgggataattttgagatatattccaaagatcctcagagcatccccaacagcattgagccccagttccccagattagtaatctactcaataaatacctcttttttttttttttttcccgagatggagtctcactctgcaccctggctggagtgcagtggcacaatctcagctcactgcaacctccacctcccgagttcaagtgattctcctgcctcagcctcttgagtagctgggactacaggcatgcgccaccacacccaactaatttttgtatttttagtagagatggggtttcaccatttggccaggctggtctagaactcctgatctcaagtgatccgcccgccttggcctcccaaagtcctgggattacaggcatgagccaccacgcccagcccaataaagaactctggattgtttcttccttttcctctcctcctttcctgttccctacagtgtttcctaggatcacctcagtctgctgtatgggaaacccagactgagtcaccataacagacagaggcattgttactttaggactttagtggatatagttacatgggagagagagactgtgtatgtatatataacctttataatattaaaccatgctatactcaaattatttactggccaagatttccaatataaattggaaataaattggatataaatcaagaacagttaaaattggaaatagttaaaatacaaataaaatagctaaaattgggcaaaatacctgacccaatgctttaatatccgattgcataattaaacgagtaaagaggaaaggaaattattagcaactctatatttaaatgcaactgacatccaaggaagtcatgaagaaaactctttgtgttgataaactgaaggcctcttctagcagacttctgtgtttattgttctgttgctgactattttattccaaacaaatgaacttgcttgtcattataccccacccttccctagtacagggcccccattctttgaaacagtaactcattcagttccaaggagaatatgaaaagggagggtaatatataaaagaactgaaatgaaaagtggcctaagtgtggcacatttccattgtggattccatggcaatggagaattgatggcagagcatggtgagagatgtgaagcatcaattggctgtatctccagggaattcctgaagttcagttgccaccctggagggtggcaaatgctctctctcaccttccttgagttattgcttagatgactcaaaacaaaaaactgatgagctataaatgggctgtattatttgtttttacctgctgagtagttcagatatttcaaaataatctcaaacttaacctatggtgtggtttctgtgttaaacaaaataccgtaacttttagttgaaaatactgtgtaagcccacacaatctcttgttcacagataatcttgttgtcaaacattcatgatgacaaaaactcataaacgattcttttaaatatcaagaataacttatgctgtaagtcataatttcataagcatgaatttatgaatgtgttttgtgtttgcaattttcatttaggttgtcttaaaatcatgcgttttagcttaacttaggagaaatatatcttttgtgacaacataggatattcagagaaacgtgaaaactaggtgatgtgttttatgaaagaaggcataaagtatatcaagcataagaactttgaattctatttgtgttttttgtggctttagaaaagattgttctgggaatagagaattccatttgggaaacctagcacatacacagtagcagagttaaaatactgacttggagggttcatttgaagaattctatagaatttttgcatgttgggaataggtttatattcttaaacattgcactcagggtttctattcaaagcaaaaataactttgcatagaccttggccattctttcacattctaaagtaatccatttttttttttcagggtagttgttctcagtcctgattttctgataattcagatcatctttaatttacaccaaaaacttttagaagagtcagataataatttaacataaaatgtaaatgactgaaatatacattttttaaaggagcagatatggaggggtccaatgtacttaactatttgctctctttgtctccttgcattcacgggaatgtttctatgtagttttctaatttcacacaatttcaataatccataccctcctcatttttatgggccttcatgatactaaaaatgttaccagaaattattttgtgttagtctctttgtttagcacattcatacataagttttaacatttaactggcatatttttaaagtaatacatgttttttttttaaaaaaaatcagttatgtttgtgtgtgtgcatattttcttttgtggccaaatgttgcacgccctagtccttctatttaaacaatgagtttacataacaaatgttacatgataaacatgaagacatttagtttgaaaaaaaatgattttctagtttactcatttaaaaaaagctgaagtaaccgggaagaggagtggcagaacatattagtctttttcataatgccatcattaaacaaagatacttaatttccaggcctggtgcagtggcgcagcctgtaatcccagtactttgggaggctgaggagggcagatcacttgaggtcaggagttcgagaccagctttgccaatatggtgaaaccctgtctcaaaaaaaaaaaaaaaagaaaaagaaaaagctacataatttccaaaatgacttcagtgggacctgaggtgagggaataaaggctctggagtaatttcactctctattcctctcctaattttttttctgttcctttataacaacattttcactacttttgagcttgggagttgaggaatcatgaccagaagaaaaggaaagacgggaaagatgttcaagggtgaggatgcttaagaatgacctggcaagcttatgaaaatgcagttgtctggatcccaccacagagattctgatttagcaggtctgtggcaaggcctgcgattctgcattgctaaccagctcccaggtgatgacactcatgctggcaacctatgaaccattgagtggcactgttccagggggcagggcaatgagaaattgaagtcaaaagccccaagacctggtgctacgaaaatactctggttccttccctctcaactgatttacttgtcggtgtgattttgcaaaaatccctgaacttcttaaatcccagttacctcacctgaaaagtatgagtgttgctccagatctggaggctttcagaccatgcaaatcgaattcaaaccatgcaaaccattcaagtcattctagaaagttctgcaaggtgcctcagaggccaaagggagagatgggaagagggattgaatgggctctttccaaggttccctaacccacttgaatactttcatcttttatctctttcatatattccacttttgagtatggtttcatttagaaaataggattttataccaacagatttaaagaaaaactccaagtctgaaaatgactcatttatttaaaactgtatagaacaaagacatttagtgcacaattccaaaaattctctgatccttccacagcatgcccagtatgctgcaagagtgccagcaaacacatgcttactgctcacaaatgtgaaatttaaccccatgcactaggaggtccctagtgtggggtggttttagctaaccagactaagagagtacagggcaacatcgagcctttctctgcggtcatgtctgattcattaaaaatccagctttccccgaagatatattaattaccttctgtttcagaatttgtttttagagcctaattcttaattatatctccagccattgtgtgatttgaccattttggaactaaaaagttatcctatgaaattccacctccaactattgccacactgttagtttgtctatttcatacaccatgccaatcttagcgtggtgctagcatttcattataaccagctttcatttttaataagaccatgtgtatatgaaattgtagacttcagtctttgtatgaattgaaagctattaatcttcccagggttaggttatgttaaacagattgtaatgttcttctttttattatgttatttaaatccccttcatttcatactgcaccaatacatttctactatcttggaataaattaattccagttacgtgatggaaaattttagtgtaaaaatataacctgcagtataattttttctgtcagaataccaactagaactggtatgtttcattctaattggaaatttgagttatcgctttgatttttaacagtgggaaaggaaaatgaagattgatatctttcaatagccgttcattcattcttcattccttcattcattcacgtattaagaatagtctatgtgctaagaacagaaagagtgttagagatatgaagattaataagaccagatccctgcctgcaggcatttcctattctatgtcatagatagggggctattctgtttagaggtaaagcatgacccacattgcctctgacaagaagcataatgtctgtagcagctaactgctggagacaggaggctagagggctgccctggtaattggtattcaagtcttcaagaaaggaaaccagctattccaaaatcagtgggcaagaggaagttgtaaagttaagtgaaatgactaaaatatgaataactaaaggttggaatctggtagaaggagaggagagcatcggtcagcaccttagtttgggaaggtggtgtggccatagtaggctttatttagaaagaagcaattcttaggtaccagctaggtttcagttccttaaggggagaaaactggcaaaatataggcaggtttccagggtgcaaagccacgttctagcttcagctcaggcaaggccctggggtatgaatcaccaccagagtagcccagccaaaatgactaagggatctaagctggttgctaatgaaagaggttgcagctcaaggcagctctgctgacgcccactggatactgggattacattgatttaacacatggaaaccacttaatatggtatgtggcacaacacaattaagtactcataaatatttgcagataatgctgctgccattgctgtttttgtcgttagaagactcgggaaaatcatctaatacaggaatccatctgttggcggggcttgggcttctaatatttgactggttgatttttgtcgacccaatcttaacaatattatacacagccattacttcaggaaaggcagttgtaaagaatggtataaatttcctgtaacttgactgccacattctagctgagtcacctctatatacctcagtttctttgtatccgcagtgaagattaatgacctcatagggttgttattagaatgaagtgaattactacactggacttatttaggacagtaactcgcacatagtgagtgctcaaggaaatctcagaccctgcctgctagtggagggtccagctcctgatacatttgggggcaggtttaaggagttcattgatttagagctgtaagggctgatctttcaccctgcatgtcttcagcaactgtggctggtaaagtccagagcagtcaaaggctgacaaatccttgttagaaatcacaaatgcccattctcacaacttctgtggtgttttccatcctttccctagaatactttctttttaaggcaaaggaaagaataatcactgcagatagcacacagtatttttttgcaacatattttcaaaaattatgatgagaaaagtgtatcattcctgtgaagaaacagcataaggaaaatgatttgagaaagaaacatggttcttaaactgaaacaagtgtcagaaggaatcccagaaggcagaaggaaatatagtaatcatgatgaagtctagagctcacaccggttaacagaatggcagcagcgatattcatctcacgcctcttccatgctgtccctgagtgagcttctgctgaattgcctggctggtgaggattggtttcagcagcagaaggaatgggctgccagctgaaggctctggttctgatcctgggtagggtcagagaaagcaagatgtgaccatcacttttgaccttggtcttgaatttgattccatggaacaacgatattttacaaacccagttgaaggtttatccctttttctattcaacacagggagagtccttagagccccaggaagacttagccctttttcattctaagagtaaaccacatctaggtttccagagatgaaaagaccaggctctgatcttccttctggaagcccttgcctattcaacaagcatgagtattaaatgctattgccttggaatcataattcagttttcacagtttgggctatgtcagaaccattcttgtcaaccccctgttttctgagaacccgaaacctgcttgtttagaattttagaatctacttgactcttacaggggagaaaagatctcttttctcacccatcgctaggttcatggctgaggcacctataatgaaggacaaatcaacaacataaaagcatgcgaatttatttaatataagtttcacatgacacaggagccttcagaaatgacccaaagaatcagggaaaagtgtgtatttttatgctctgatttgaggaaaagtagatgtccagtatgactggacaaaggggaatggtaataaactggggtgaccacagcaaggcctgtttctgcagaacctcctgtgtccctgtgttttcagaggtaaaaattttcctttccttccagtatagtaagggcacctctggtatgatagtctcatgacctgcttcaggggagaagggggaaggggaaggtgagagtgaccatcctgcttctgctgtcttctcaaataccaagctgccatattgtggattttggagtagcgtaacttgaatccttttttttttttttttttgagacggagtctcaccctgtaacccaggctggagtgcaatggcacaatctcggctcactacaacctccacctcccaagttcaagtgattctcctgcctcagcctcccgagtaactgggattacaggcacatgccaccatgcctggcaaattttttgtatctttagtagagatggggtttcaccatgttagccggactggtcttgaactcctgacctcgtggtccgcccacttcggcctcccaaagtgctgagccaccgcacccagccgcatagcttgaatcttatcaataccttaaccaaatgactctgacagttttcctcttcttatctaaattcttgagggtcacccacacttcccaatgtcttttgaaacttgacctcttttctgctgaattgaggaagatacctgatttctttaacctcaccaaattcctacttcttactgttgttcattgctggctgaaaatttactttggcgagttcaccaagaacatacttatcggttcactgtttatatttgcactcaagataacacttgaggccctgctactcaaagaatttagtgacaactttcttcatcactctcatatcttatctgtcatcaagtctttttttcctcgtaaaaatgcttttagctctttaagtatgtttcatatctataatagctaagataggctaacagctataatatattaaacatccaccaaatggactattaaaatgacttaaacaaaatagaaatgtatttctttctcatgtaaacagtctaaggtgaattcatgttagttggtgttggatgtgtgtgtgggaagggaggggtgacacccacataattattcaagaatacaggccaggccaggtgcagtggctcacacctgtaatcccagcactttgggaggccaaggtgggcggatcacctgaggtcaggagctcgagaccatcctggccaacatgatgaaaccccatctctactaaaaatacaaaaaatagctaggagtggtggtgggcacctgtaatcccagctacttgggaggctgaagcaggagaatcacttgaagccgggaggcggaggttgcagtgagacaagatcatgccactgcactccagcctggcgacagagcaagactctatctaaaaaaaataaaataaaataaaaataaaaaataaaaaataaattaaaaaaaaaacaggccagcaagggtcttccatctgcaatagccaattgccgaggttgccctcctgaagatattcagccagcccaaaggggaatgagctagaggactgcacacggaggcgtcccatgtcctttgactcaaccttctactggctagaactctgccctgtggccacatgtaacagcagaggggctggaaaatgaagtctagctagatacctaaaaagaagcagagaaaggtttcaagagcatttagcaaccatatccaccttattcatgccctgccctctattcgcagtggccccgcagcactgctcaactagcttgctgcattggcctcttatctcttatctattgccttagatccatctaaatgctctgctactcttatgcctggaatatgttttcaagatgtgactaatcctctcacagcttgaaggataaaaggtcaaactgctctggtgaatgcatgatgcctggtcacctctgtagccccatcttccctgacactttcacagacagtattccctttactccaacctgtgggagtattttctaattcacaataatagcaggaaatacaatgtggaccagacacagttctgagcagtatattaactcatgcatttcttacgataactttataaggttgacagtagtagtatccctatttcacagagaaggaaagagatacagataagtaatttacatatgatctcacagatagtaagtggtacagcttgagtgcatatgactcaaagggtagaggttctagattcttaatcactgtattgtactacttctcccaatgttatcgtacatgccattccgtcttcctggaatacccttcgtctttcttcatctaacttccactcaaactttaaggatcaatttaagcatgccttattttaggtagccatggttgacatcagcctaatttaattgctactcatctatgtccccatagcgtcctttgcattcctctatatctctctgctatagcagtaaatgtaccaccattccgtaaaatccttaagggaatgtttagttttatgttcccaatgccagcacaatgtccagaacagtgttgtcccatagaaatgagagccacctatgtaatcttaagtattctagtagccacgttctttaaaagtagaagtgaaactaatattttattgaccctgatatatccaacatattattatttcaatatgtaatcaataaaaagtattaataaaatttgctttttccattctaagtctttgaaatctggcatgtgtctttcaattgcatcccatctcaatttggacaccgtattttcattgaaaatatttggtctcacctgcacacgtatgtttattgcggcactatttacagtagcaaagacttggaaccaacccaaatgtccatcaatgatagaccggattaagaaaatgtggcacatatatatcatggaatactatgcagccataaagaggatgagttcaagtcctttgtagggacgtggatgaagctggaaaccatcattctgagcaaactatcacaaggacagaaaaccaaacaccacatgttcttactcacaggcgggaattgagcaatgagaacacttggacacagggtggggaacatcacacaccagggcctgtcgtggggtggggggaggggggagggatagcgttaggagatatacctaatgtaaatgacgagttaatgggtgcagcacaccaacatggcacatgtatacatatgtaacaaacccgcacgttgtgcacatgtgccctagaacttaaagtataataaaaaaaaaagaaaatatttggtctctatttacatttcataaactttatagttgaaaaaagaagattcacattcctaagttgttccaaacatacacaaaagtttttcaataactgaaccaagagtcaatttttaaatttatatttaaatttaataaaatggaataaaaatttgttaaacttcagtctctccgtctcactagcctgatttcaattgctcggtagctacctacagccagtggctcctgtgttagacagagcagcacagccctagaacacagtagatcctaaatcgatgtttattgaagaaattaatcaatgacagtgtagaaaatttgcagtgattatgtcagaatcaatagttctccacccattttctcccacactctcaaaagggccaagttttatatcaccaaatgatattcctcttacttctttctgagcagaaacagttttggaaattaagatctttttcaaattttccagactcggcattttagcagcgtttctatttgtaccaacaatgcctttctacctattttccttgcttcttaataagttaactttgtgcgaaggtcattttgtaggtcagtgtaatattgtgcattaagggcttctaagttttctggtattataagaactccttggtttccttctacttttcagaatggaaaatcctcagagcaattttcatctaaaagtgctgcatttaggttgtttcacaattccccaaccctgagtcaaatataggttggtgtatgagcagcagtgtctcttggctaatcaagagcgtctccttttgctacgctcagtgttagagaaatggagaaagtcagctgggtttagagattaggtgagagactcaggcatatcctttgataagtcataaatcatttcctgtttagaaaagcacatgtttagacacccataaaatctccaaatgaagggtgttttacttttccttcaaaatctcactgggaaaaggtacttctgactttccaagtgaataaaaataatgactcctgattaccatgtatgtttaaactgatttgcaaagcaagtgaaaaagagtctagtgagtagtgataagcatcttttagacatcagaagatgtactgatttaaaggtccgtatcattttataactagtatctattgagattcaaatggttattactctgtgtgaatctgtcttttctaattgtttttacttattttagaatatcgatttgtgaatattaaattcctaagttttccagcaatccagtgtttgttttggatatccagcctggatgcagaatagctgcagaaagttatcacaaattgatctctatattctgtttccgagtggcaattgtcaaaaatttggggtcatcggctacccctcccacccctaagaagttccttgtacttcctctttcaaaacactcacatcattgttcagtgcctcacttctctactaaaatgtaaccaaccacaaagatagggactatgtctttcctgtttactggtggattctcagtatctagcaccatgaccaatgttaatagacgttgaatcaattccagttgttacctcttcacactgggacaaaagtccttgcaagtattctgctgccatttgtatagattcaagccaaatatgtctcaaaacgatattacagatgatctcttcgttgttcctctgacaatttctttcccccctgcattgcttaacttgattgacaatgacccctactacttataacatgtgccttttaggtagtgcacttggcactacattttatgtgatagttttatgatgctaaagactatttgctgtgatgatgctgtgttctcacatggcatatccagatttatttatgctggtgaccaaaggcaggtagttaaccttgaaaataggttaaaatttgaaaggcagcaaatcttagggctagaatttataatttatctttaaggaatcttgaaaccaggtgtgaaggaagggacgtaggctagaagtacagaaacctgggttctgctccagcactgatgttaagagcaagttgcattgcttttctggaccttaattttctcttctggaaaatgaatagattaactggaacaaggaaggaaaatacgtgaatggcttccgtttctgtctcgtttacccctgaaagacatggctagtcagtcagctctgtatcagagcacttctcaaggcaatgctccaggtagctaccactcactaatgagagttagcacataggtaaaacctctttgtcatctctaggctacttcatgtttaagatactctccagctttaaaattctaataactctattagactgaaatttaagaatacgagaataatcatccctcaccatgaagagagagtctgaggaaaaaataatgagaacgaataacccttctcttttactacaattcaggactgccatgaagagccgtccagattgtgaaacatacaactcatgatgtgaatggtacttctttgtttttctcggtgtacaacttgcacagctgttcatggccctctgcttccacaaattcatttctaaatagctgtacctcagttctttgacttctagtatgtctaatttaatacacatttctagatttacgatatataagaaatatctccatgaaggaaaaatgtaatagcccatgcttttcattataatagaattttatgaaacaatgtcttttaaaaacagaaacatatgtactactacttcgcaggacattagcccttgtatataaatcaataatacaaaaaattcaaattaccaaggattagaaaagactgctgtgggatatcttctggtgcaagcatacagttatttatccatttctttcatgaatatttattgatgttccaaacattaggctagacactagagacacatcaataaataaaggaaataggtttgatctctatcttctttgatctgtagtttagtgggggaggaaggaaattaaacaagtaactactacaggttgaacatccctgatccaaaaacctgaaatccaaatgttccaaattccaaaactgtttgaatgctgacatgacatcacaaatggaaaactccacttctgacctcatgtgacaagtcacagtgaaaatgcaggcacaccacatagagtttattcagcatccccaagggaagaaagatcctctcagcccccgttagctgtgatatatcttttccacccacacccagattccatcatacaagcaaacccacaaaaggtacgaaaaatggcacatgtgcgggctagacgcgacaacggcaggtaccctacaatgtccagcatggggccaaaacctacgtgcattaatcactgtgtttgctggtatattctctggtggtgtcaagatattgttgaaaatgccctaaaggcctgcatgatatccatagggtaatgcaaatattccaaaacctgaaatttgaaatactttcagtcgcaagtattttggatatgagatattcaacctatagatggtaagggtattactatgatagtgctacgggtgtacatcaaggtaattgaccctggcttggcaggatgcagaaggctttcccaaggaagccttacctcagctgagacctgaagagaagcaggagttagacaggtcaagttggggatttggaggaggtggagtcccagcagatggaatactatgcataaaggcctggaagtgagaaagtcatgtcatgttatttcaagggactagaggaagcttagcaaactggaggcaagaagatagcttcagcacactattgaaattgtccaggtgagtaatgatgatagtgtaactaagttgtgatacctaggtatgtgagctgaacctatggagaaatgttctaggctagagaatctttaattggatatttaattatcagtatatacgtaattaaaaccttgcaagggtttgaaatggttcagagtaaagttcgtagatgagaagagggcctaggagtgaacccaggaaaatggcaaagtttcaggggtaaataaagaaaaataagctttcagtggagacagggaaatttgcagttcagtagataggagacagactaggttcgtgtgatgtcacagaatccaagggaagagaggttttcaagaaaaagtaacatttagaggtgtcaaatactacaaaagcatcatgaaagataagaccaaaatatatcctattaatttagcaacaaggaaggtattgacaacctttatgcaagtgatttcagtgttgattatggagaactcagtaattacttggtggtaactaaagaaccaagattgcagtacgttcaggcatgattgagaattgagaaagtgggggagcaagtgtaaaacaattattttaagacttttggctgcgatgggaagagagaaagggccatagtagcagaagatggatgtaggggcaggaagaacacactcttaaaagggtagtgacttacacatgtttaaatggcaatgagaagaagatggtagagagggagaggttgaggatgcaggagaaattagagataatcaatagcacaggtacttgagaaggcagaaagatgaaatttagaaattagcttcagataggaaggaaagtacagcttctattacaacatcaggggagaagggaaggaggatgggcatagctactggtagttttgtaagtttggtgaaaggttaagtaggattgttgtattggatttattttttattgaagtggaagctgcagctaaatgcccagtgatgaggaaggtgttggagtctgagatttaaggtgagtggcaatttgaaatagctgctctaggatcctatttaacagagaaaatgttgagtacacaatcagtgagcagttttaagtccactctattctgtttgcagtttcaagtacctttcattgcttctaagtttatgaaaactggttcacaatcttcttgtgcttcttatttctacctcttttccttctgttttctcacctccccagtttaaacagtcccgaattttttacaattaaatatacagcaactgccatgaaatctactgataaaagatactgcaaaatcagtttgggattgggttcattagcttacttattattatcaatcctaggccactaagcaaccttgcataaaatgcataaaatgaggagattctagtggaggatagttttcaattatctcattaatttcaggccatgtgactagtccaaatagatattataggccaagaagagcctatcttgagattttaactcccaggataggttttctacctgatcaaaagaatctaataactattcaatctcttcttaaatggtttggttttctgtgcaaacagttttacccttttagctgattttctaggtgttaaattaagaaaattctctcagatacttgttcatcatgtactaggatccctgatgtgttcagagttgtccaactttcaaagggctttgcattcagagtacctaatctaaaccctgatatcattcttttataacagaaaaccccggattagactgggacagtgtctgtcatgttcatcactgcatctccctcagtatttgtagaatgaatgaagggacaatggcaaactatagtcctaccatcacacttttggtagtgaggagaactgctgtaacttggaagattggagggggaaaaggtggctaaaacaatcatacagtaaactgggctgctatcaagagaaaccatttgtcaattttggcttttgttgccattgcttttggtgttttggacatgaagtccttgcccacgcctatgtcctgaatggtaatgcctaggttttcttctagggtttttatggttttaggtctaacgtttaaatctttaatccatcttgaattgatttttgtataaggtgtaaggaagggatccagtttcagctttctacatatggctagccagttttcccagcaccatttattaaatagggaatcctttccccattgcttgtttttctcaggtttgtcaaagatcagatagttgtagatatgcggcattatttctgagggctctgttctgttccattgatctatatctctgttttggtaccagtaccatgctgttttggttactgtagccttgtagtatagtttgaagtcaggtagtgtgatgcctccagctttgttcttttggcttaggattgacttggcgatgcgggctcttttttggttccatatgaactttaaagtagttttttccaattctgtgaagaaagtcattggtagcttgatggggatggcattgaatctgtaaattaccttgggcagtatggccattttcacgatattgattcttcctacccatgagcatggaatattcttccatttgtttgtgtcctcttttatttccttgagcagtggtttgtagttctccttgaagaggtccttcacatcccttgtaagttggattcctaggtattttattctctttgaagcaattgtgaatgggagttcactcatgatttggctctctgtttgtctgttgttggtgtataagaatgcttgtgattttagtacattgattttgtatcctgagactttgctgaagttgcttatcagcttaaggagattttgggctgagacgatggggttttctagataaacaatcatgtcgtctgcaaacagggacaatttgacttcctcttttcctaattgaataccctttatttccttctcctgcctgattgccctggccagaacttccaacactatgttgaataggagtggtgagagagggcatccctgtcttgtgccagtttttaaagggaatgcttccagtttttgcccattcagtatgatattggctgtgggtttgtcatagatagctcttattattttgaaatacgtcccatcaatacctaatttattgagagtttttagcatgaagggttgttgaattttgtcaaaggctttttctgcatctattgagataatcatgtggtttttgtctttggctctgtttatatgctggattacatttattgatttgcgtatattgaaccagccttgcatcccagggatgaagcccacttgatcatggtggataagctttttgatgtgctgctggattcggtttgccagtattttattgaggagttttgcatcaatgttcatcaaggatattggtctaaaattctcttttttggttgtgtctctgcccggctttggtatcagaatgatgctggcctcataaaatgagttagggaggattccctctttttctattgattggaatagtttcagaaggaatggtaccagttcctccttgtacctctggtagaattcggctgtgaatccatctggtcctggactctttttggttggtaaaatattgattattgccacaatttcagagcctgttattggtctattcagagattcaacttcttcctggtttagtcttgggagagtgtatgtgtcgaggaatgtatccatttcttctagattttctagtttatttgcatagaggtgtttgtagtattctctgatggtagtttgtatttctgtgggatcggtggtgatatcccctttatcattttttattgtgtctatttgattcttctctctttttttctttattagtcttgctagcggtctatcaattttgttgatcctttcaaaaaaccagctcctggattcattgattttttgaagggttttttgtgtctctatttccttcagttctgctctgattttagttatttcttgccttctgctagcttttgaatgtgtttgctcttgcttttctagttcttttaattgtgatgttagggtgtcaattttggatctttcctgctttctcttgtaggcatttagtgctataaatttccctctacacactgctttgaatgcgtcccagagattctggtatgtggtgtctttgttctcgttggtttcaaagaacatctttatttctgccttcatttcgttatgtacccagtagtcattcaggagcaggttgttcagtttccatgtagttgagcggctttgagtgagattcttaatcctgagttctagtttgattgcactgtggtctgagagatagtttgttataatttctgttcttttacatttgctgaggagagctttacttccaagtatgtggtcaattttggaataggtgtggtgtggtgctgaaaaaaatgtatattctgttgatttggggtggagagttctgtagatgtctattaggtctccttggtgcagagctgagttcaattcctgggtatccttgttgactttctgtctcgttgatctgtctaatgttgacagtggggtgttaaagtctcccattattaatgtgtgggagtctaagtctctttgtaggtcactcaggacttgctttatgaatctgggtgctcctgtattgggtgcataaatatttaggatagttagctcctcttgttgaattgatccctttaccattatgtaatggccttctttgtctcttttgatctttgttggtttaaagtctgttttatcagagactaggattgcaacccctgcctttttttgttttccatttgcttggtagatcttcctccatccttttattttgagcctatgtgtgtctctgcacgtgagatgggtttcctgaatacagcacactgatgggtcttgactctttatccaacttgccagtctgtgtcttttaattgcagaatttagtccatttatatttaaagttaatattgttatgtgtgaatttgatcctgtcattatgatgttagctggtgattttgctcattagttgatgcagtttcttcctagtctcgatggtctttacattttggcatgattttgcagcggctggtaccggttgttcctttccatgtttagcgcttccttcaggagctcttttagggcaggcctggtggtgacaaaatctctcagcatttgcttgtctataaagtattttatttctccttcacttatgaagcttagtttggctggatatgaaattctgggttgaaaattcttttctttaagaatgttgaatattggcccccactctcttctggcttgtagggtttctgccgagagatccgctgttagtctgatgggctttcctttgagggtaactcgacctttctctctggctgcccttaacattttttccttcatttcaacttggtgaatctgacaattatgtgtcttggagttgctcttctcgaggagtatctttgtggcgttctctgtatttcctgaatctgaacgttggcctgccttactagattggggaagttctcctggataatatcctgcagagtgttttccaacttggttccattctccacatcactttcaggtacaccaatcagacgtagatttggtcttttcacatagtcccatatttcttggaggctttgctcatttctttttattcttttttctctaaacttcccttctcgcttcatttcattcatttcatcttccattgctgataccctttcttccagttgatcgcatcggctcctgaggcttctgcattcttcacgtagttctcgagccttggttttcagctccatcagctcctttaagcacttctctgtattcgttattctagttatacattcttctaaatttttttcaaagtttttcaaaagcaatggcaacaaaagccaaaattgacaaatgggatctaattaaactcaagagcttctgcacagcaaaagaaactaccatcagagtgaacaggcaacctacaacatgggagaaaatttccgcaacctactcatctgacaaagggctaatatccagaatctacaatgaactcaaacaaatttacaagaaaaaaacaaacaaccccatcaaaaagtgggcgaaggacatgaacagacacttctcaaaagaagacatttatgcagccaaaaaacacatgaagaaatgctcatcatcactggccatcagagaaatgcaaatcaaaaccactatgagatatcatctcacaccagttagaatggcaatcattaaaaagtcaggaaacaacaggtgctggagaggatgtggagaaataggaacactcttacactgttggtgggactgtaaactagttcaaccattgtggaagtcagtgtggcgattcctcagggatctagaactagaaataccatttgacccagccatcccattactgggtatatacccaaaggactataaatcatgctgctataaagacacatgcacacgtatgtttattgcggcactattcacaatagcaaagacttggaaccaacccaaatgtccaacaatgatagactggattaagaaaatgtggcacatatccaccatggaatactatgcagccataaaaaatgatgagttcatgtccgttgtagggacatggatgaaattggaaaccatcattctcagtaaactatcgcaagaacaaaaaaccaaacaccgcatattctcactcataggtgggaattgaacaatgagatcacatggacacaggaaggggaatatcacactctggggactgtggtggggtcgggggaggggggagggatagcattgggagatatacctaatgctagatgacacgttagtgggtgcagcgcaccagcatggcacatgtatacatatgtaactaacctgcacaatgtgcacatgtaccctaaaacttagagtataataaaaaaaaaaaaaaaattaaaaaaaaaaaaaaaaaaaaaagagaaaccagtgctctattatctaggtatataccaaggttacccactgcttgactctcattattagccttctttgatgttctctggtacttgatgtctttcataactaatcaatgtattaatgtatccaatcatttactcgataactttattgaaagcaaaagcagttgcataccagctatcaagctggaagtgggagatacagccgcagacaaggcagatatggtcccagcccttaggagctcccagagtagcaggaggtttccccttccagtgtcttctctctgcttttcttcaaaaggaaaaggctgatgtgtataatataccatatctctttgaagttctctgattatggattttaggtttaaaccagttcttcatccatgactttataaattgaaaatccaggattttgctgtgttgttgtgttcttgttttgttttgatgtccctgttttctctagatacagttagaaatgtctaggaagaaatttttggttagtatgggagccccacaaagccatttttttaaacataaaatctgtattacatatcaggtatgaaatacagggggaatgaatcatttctccgtaaaggaaaatttaaagtaaatttcaggaaagtgaattctttcccgtttgcattaccgacagatgcagaaactttaatcgtcatttgctaagagggatatggcagataatacacaatagatgtcgtagcaacattcactcgcattctttttttttttttttaaagaaatctttctttcaagaagctattctaggatctttctcatgacagtgtcctagttcttatctttgctacacacaggctcacaaagtgttttctttgaagggcattttgttattggccctcttttcatttttcttttccgtagcaaacagaaccgaaggtgtttactccccacggtgagagggcacctgggtgcacaaacagtggtgtgaaccactggcctttctctgctttccgttccctgaatgtaagaaacaggtgcagtgatcaattcactgcgtgcagtgaaccccaggcagaaagagaacgtcgtgtcacagaccttttgttacttggagagaatgagcgggaagaaaggctgcctctgctgctactgagacccttttgcccattttattgactgctataggttcatctatcctaatttgtctccggctgtcccagtttatccctgttattcttgtgttactttactttactatattttattttattttattttatttattttagagacagagtcttgctctgtcacccaggctggagtggagtggcatgatcatagctcactgcagcctcaaactcctgagctcaagcaatcctcctccttcagcctactgagtagccaggattatagctgtgcaccactatgcccacctaattttttttttttttgaaatggagtctcgctctgtcacccaagctgcagtgcagtggtgcgatctcggctcactgcaacctccacctcccgggttcaagcgattctcctgcctcagcctcctgagtagctgggattacaggtgcccaccaccatgccctgctaatttttgtatttttagtagagacagagtttcgccatgttggccaggctgttctcaaactcctttaactgtttttttatttttatttttaatttttaaaacatattgtagagataagagtcatgctacattgcccaggctgatctcaaactcctggcttcaagcaatactcctacctcggcctcccaaagcacctggattacaggcatgagccagtgtgcctgaccctgtgtgattattattagcatcctggacactctcaaaagtgttcaggtttggacaatgaactataggatcaccctaattacatgagattaagagtagagaccttgaccaccagaaatggtcaatactcaccatatattttcttcctgatgttagaacctggtacttttgggaaatgaaattgtacatgagatatatgcagaatgggcgaagggagcgaaaagatttaaaaaattaagctcgatttattgagcgcctcgagtgcgctcagtgctgttccaagtgctgacagcagagaggtaagttctgttctccagtgttcacctcacacgtgcaagccaggtttgaaaacacactgtctttccttagtatccctccacccctccatgtgactatacgtatgtatcaagtttgtgatatttcacttctgggcttcttttcatttggaaatttaatgtcagtgtatcatgttttaattaataggacatcatgttatgaaactgttgaatcgaatattttccctaggcatcaaattacttgtcagtggaaatttgacatctagatatgagggacaaaagagatgagaaaaataatagtaaagtgttcctaaaggatgctggtatactgtttaggtattttaatgcactgttacaacctaaagtgtcttgtaaagtatgttctttagaaataaaataaataaaacaagacatctctccataggtacaaatccacttgccttcctcaattcctatccttctgtgatgggaaatctctgctgtgacaaagaaccatgttaagaaaaccataaagttgtattgtttgtagatttttttaatgactaaaggaagatattgcaagtagtagaaacaaatagaggaggtggccctgaaggtcaatataacggagttcactgcagaaaagagaaactactctaggtacgttagacacatatcaaagttttggaaaggctaaagtagcaggttttagacttggcttcgaggacagatttctaaaactatatagaactgatccaataagaaactaccatctccggggtaccactgaagcaatgatttcaagaacatactttgtaaataggaactaggaaccaggaggttgaaatctagacgctaccacttttgaagctgctgttagcaactgcccttctccagccaggaagctggagaaagaactttggaactctgatgtaggaaatctcatgtttctttgactaagctcgccaacagaaatagccaaaaggggcagaaaggtgacctatgcctcacttccactttccagatctctcacaagtatacacatttggcaaaacgttgccagatttagcaaataaaaataatgcatgcaacatacttaacactaaataaaaaaagattgtgtagaaaatttaaatttaactgggtgccttgtattttatctgacaaccctaacttattatatcctaattcataatcagaacactagctgcatggaagtctggcaaatacagtttttaatttccaacctgtccaactggaaggatggtaagtagatttaggtgagccagttcacagtattaaccaaagtagattgcctaccaagaatagctaaagcctttctgcccccagacgcttatgctaccatctgaatatttttactttgcattcttatattcttggaaatcctatcaatctgtgattcagattggtttggtttaactcagcttccccttttttttggagacagggtcataccctgtcacccaggctggagtgcagtggcacaatcatggctcactgcaacttcgacatccctgggctcaggtgatcctccctcccacctcagcctcccaagtggctgggactacaggcacgtgccaccacaccccgctactttttgtattttctgtagaaacagagtttcgccacattgcctaagctggtctcagattcctgggctgaagtgatccacccaccttggcctgacaacgtgctggaattacagatgtgagccaccatgcccagcccctctttttaaaatataaaaatctcccagaatgtgaaagttgtcagtctatactttgggaataagattttcaacagatagaagagaatgaggattaaaacataaggaagtttgggagtagaaaatatgggcaccagaaggtggaaggagagagcagatgcccatttatatatctcctttgttgggtgttggacaaatccaggtcttaaaataggaagtatttcttttccgtacttcttgaatctttcatatcccaaaagatgcatatttcccaaatcatataacccaaagtcatgctatcaaaatgatataaatcatccatggtataggttaaatagctatatatgtatatgctggtctgagacatgtatatgactattgtgtccatggaaatttgagtttggggttctggaccatttatttgcaagtgatttttggttagagaactctttgtaagttggggattgcttttacttattttatgagtaaagatgtcaaaaggatgactgctaaatttgcactgtgttaattcactatttagtgagaagaaatattagactagctatgaaaagtaaaactgcctctccaaaaagtcaaagctgatgaaaaacagtcatacaagcacaatgccgctcttcggaaacatggaaacactttttccttcccaattttccctcagattttctcttccgcatttaaaacacttgggtggttcaagtttctaggctaccactgattgtaacagcaaacagtagcaactggaagcagtgggatgttgggagaagtaatagaggtagctgctacccaagttatcctggaggattttccatggcaatgaaatcaggtagtagaagcttggctaactgagtgtaagcaaacagttctactgagaatggtgttgtcttttcaatccgtttatctgtgatggtgatagtgtgaaacaggggaattttatccaaggtttaaggaaggttatttggttaaaagaggatattgttacagtgaagtcaaactttccattaactttttgctgtaacaacagattgaacgtagcatttcaccgtcaacgagtaaagtgaaatttacagattaacttatgtgcctcttttaaaatatatcagatttctaaattgcttttatttcagaggtatgggaggttcactttctctttgaaagtgtacattatttttctagtgtcttacatctgcctacaaagatgttattttacttgaaagcacagtaactatttgatgagaatttgtcagcatcagtaaattaaagaccctcaaatgatttctactaattatagtttaattccgtacatttaatgatattttaaaacacatgagttatttcataactcccaacatcacaaggataaattttattctacaaacaaaatattgtgctaaatgaaatagttcatttaggcaaagaaaggagcacagaaaattagtggaactctctgctgtaagtaacgtagacattacatggcatattgagtctccatgaatattgtcatgttatgttttaaaaaggtgatcgaacatatggcatttaaaagttccaagtcctcttttaaatgcttcagaatctattatttaatgatcatcttggatctcaaaactgatcttttgaaagattttattcgccccatgtgttaatatgatttccctgtcatatgatatgattatctatcaatacttaaaaccagcagccaagtaaaaaatcagttcatatcatttaatgaatactatgagtcaggatctgggtaggcaagctattttcgggtttgagtagttccaaagcttaaaaatcttatattgattttacagtgaagaagaaatagtcttagctactttggaggtttcaaacattgactactcaaggagtatttccttgctttctcaggcaccaggcagtttttcaggagcaagcattcatccattcagggaattgtaacctgtagtttccacttttctagcaatcacacttaaaaccatgagagtaggccataggacataaggagctcagcttctcagggcaagcacatcctttcagctttcacctgtccgtttgttagtgttcacttccgtgctcaaggagtttcttgttgcctctgagttctaagagacagaacgaagggagaagggtgcagaagtctaacgcatgttcatggacttatctctccaataaagagcttgttttatcttcttttatttatttattttttctaatgaagccattagcctcaaacaaagccatggaatcttatcagagtgaaaccggggtcattccataggctggctgagtgagagctccatggcacgatgatgtatggtcactgcacaacaacgcctttgccacaacacatgtgccttttaattacactttaaatctcatttgaagagatgttatcattatggaaattgctctgtaaatgtgcccaggatgagacccaataaaagtttgctgagaagaattgaagacagaggagatgaatcagcagctaaaacattaccatcagacagaattttcttggctgtaggcaaaacagcccatgcaataacagaaaatcttcattgactcagaggcgtattttccctagattattatggggcactcctgcctgtagcactatcacttctttgataagctgaaggaagcgttctgctctccagctcagcgggcctttttctccccaacctcagagccatcatttgaatttatagttgccaaaatgaataatacagtattgcccttgtgttcctgacttcatgcatgcatgcagagcggggttaaggttctttaaatgaaagattgccttctattcatgcaataaagaacacctctgcttcctttccagggtcatttaaaaataactataccgctgggctatggaaagcacataagaaagattcttagggtaaagtcaaaatgctcttttctctacaacaggcattgtctcatatctttgtgtagcacagctgatttgaagttttcttttaagcacattcttaattatcttttcctttgatcttgaactgtttccctgggctaccagacagagagcctagagccctacctccgctttccccgaggtgcaaactgctccgtccttccacaggcaggcccctggctgaatgcacccttttctccatggttacccacccacctctctgttatttgttacttcccaagtgaatggcaggttaaaatgggaaaaggtcaggttatctgaatgtggttagagtgaaatgaatttcctcattgcacccaagaactgtcctttgacaggtctccttccccaaatcgggtcattttgtacgtaggctcactgggagtaattctaagacaactaaataagtaaaatcacattttggtgccattttccaatgtattcttcttcttgggggttctcctttaaaatggtactggaaggatacgttgtcttcattaatccattgtatgtcccgggggtggaggtggaggtggcagtagcagaagcccgtgaagtaataggtcgtattttgtgtttataaatatttctgcaggtttttgaggagaagatccatcattcttataaaggcattcatgacctccagaagattaagggctgttatgctagaacagtgtttcattcttaaaatggggtctctggactagcagtatcggcatcacttgggaacttctaagaaatgcaaattcttgagttctaccccagacatacagaatcatgatctctcagagtggagcccagcagcctgtgttttaatgagccctctgggtgattctcaagcccactcaagtttgagaaccactgtactaagggaactactgatgcatgatgcaagttcacgctcacaggcacgtgtgaatgacacaaagaacacagacgcctgagagagcaagaaagacaacatagactgtctgactccctgctgggcccttctttaccgcccctatttcaggctaccatgcccatgagtggatgacacgtaccccccgacaaaggtcaacaccactctcccttccacaccctatcactaagtgacaggctaagcctatgttaaactgctcacatctccttggaaattcaacactttaataataggtagcattatcacccccatcttcttctctaagccagaaacccaacttgcctccctatatgttatccttgcattcagtcagtctctaagttgtattcatgatctctcaaaaatatctccctttttctcatcctgtgtctattacctcagtttagatctccatattctcttgcctctaatgttcttgcctctaatgtaccttttcactgccaccaagatgatgttaccaaaaaatcttaaacagattagacatcttcacaggataaagtccaaacccttagcttgatacacaagccccttcacaatccaggccctccttcctgtgcagctatatatatatatatatatatatagagagagagagagagagagagagagagagagagagagaaattttgatcttaccactctgtctctcttcccgccatgggtcttcccctcttccctccggagttacttagctctgatgtgtattcttatctcgtcttatcttcaacttcattcatgtttttcccactgcttcaaatttcactctcccacttctcccctggccagctgctactcatccctcaagaccctgatcaaatatcatcacttgtatgatggcatctgcaaatcttggggggcaaggctaattgttctttgttcccacagggctgtgttccagtttaacatgatcacatgttattttggttcatttatttgcttaagactttttcagaaggctatgggctctttaaaatagagaacttacatcttgtagttttaagagtatttttagtaaaagtttagagtgacccccatctttctgccagcccacaaaaggaaaacatcaaaaagtgaatgtgtaaaaggaagagaactctgacaaaaccaggcagaaaggtttttcagcaagtctttttattttctgttcaggataacattaataattatccacgttggtttctcattctcctgttggtgaatatttttctgctaaatttaaaaccgtatcacaaactcaagcagagatttacaacatttcaacagcttttctacccctgccttagaagggtggatcaaaaacatttgtccatggtaaagcactatggacatgacttagttaacaattctctgtttgggtcaccatgaggcttcttcgtttatactcagggtcagcgacaatgctgatatgcagctacaatttctcatttcttactcagggtgttatgaagcagatttccactgttctttaatcgttattaaaatgtagtccaggtgcagtggctcacgcctataatcccagcactttgggaagctgaggcaggtgggtcacataaggttaggagttcgacaccagcctggccaacatggtgaaaccctgtctctactaaaaataaaaaaactggccgggcatggtggcaggtgcctgtaatcccagctactcaggaggctgaggcaggagaatcgcttgaacccaggagggggacagaggttgcagtgagccgagatcacaccattgcactccagcctgggcgacaagagcaaaactctgtctcaaaaaaaaaaaaaagtcattctcatgtaaaaattcttgtaaaataatctgtaaagtcatcctcttatctgttctagttcttcataagacttatataacatgtcatatgggcatggaaaggcctaagccttcccaaaccttgctcttttggggatgattttccaaatgtacttgttctcagttgaaaagagcattgcggccgggcgcggtggctcaacgcctgtaatcccagcactttgggaggctgaggtgggcagatcacgaggtcaggagatcgagaccatcctggctaacatggtgacaccccgtatctacttaaaatacaaaaaattagccgggcgtggtggcgggcgcctgtagtcccagctacttgggaggctgaggcaggagaatggcgtgaacccgggaggtggagcttgcagtgagccgagatcgcgccactgcactccagcctgggcaacagagcaagactccgtctcaaaaaaaaagaagaagaaaagaacattgcatcatggcacaaggacacaaaaaataccctggacctgcttcagtgagatggtctaagggtctctagcatcttctgaactgaactgaatgctttgggaagaattaatagatacacgatgtatattagttcgtttcacactgctataaagaacttccctgagactggggtaatttatttaaagaaaaagaggtttagttgactcacagttctgtgtggctggggaggcctcaggaaacttataatcatggtggaaagcaaaggggaaggaagcaccttcacaaggcagcaggagagagagagaaagagtgaatgggaagagccccttataaaaccatcaaatctcatgagaactcactcactatcacatgggaaaacagcatgggggaagccacccccatgatccaatcacctcccaccaggttcccccggattacagttctagatgagatttgggtgaggacacaaagccaaaccatatcacaatggaaagctcatgaatgggttctaagaatgaggaaatgtaccttagcattttgcctacttttcctttatgacatttttttcccggcaaatatgccaaatattacctacctttacatcagtgtccacatgcatatcccctgtcttcctccttttcctcatacattaacaaaagagtaactttgttttctccccatcactgttcaccctattgtataagagaagaaaagcaaaataggatgaaagaactatctaggcacacacacaaaagtcacactctccagaagaaagaatttgctctacttggtagtagacagaaattaactcactgaagatcaccagagaatcagatccaattatatcagcaggactttagtttacatcatggtactagaaccttctttaacattcaaaacttatgaatacctagaaatagttttaaggttaatatctctatgctgtgggctaaagagtacccacaaatgaatacagttgtgtctgatgagtgtctgtgattattttggaaattgtcctgctatttaaaatgaaaaaaatagaaatgtcttagattttcctatcattaacctattgtaaacaattacatcagtgtagggttgttttgtggttgcgtgggagtattttgaggtttttagggggtaaagtgggggatagaatgaagttgttgtttgcatttacaaccctaataattaaaacaagccagagggaattacctacatggctgttgtgatttctagtgtatgatcaaaaataattatggcactttgccatatgttcttgctttcttcttagatatgtgttattgggaaaagatgagacttgacatcaactaattgcttttttctaatatacaaccttgaaccacagtgattctctggaggacaaaaaatagcttagtgacaaagagattccagaaataagagcttttcgagcttttaactctctatgtaatatagacaaattgcacagattaatataaccaaatatgtattggtccatgggaagagagttacctatttgaagaataggagtgtattgtgttcatttagaaccattcagaaacatcaatgatattagttctgagttgactaaggataaatttttaaaagcaatacctaattggaaaattattcagttgttgaccattcctatcagtgctctgaaactaaatatctcacagatgccttaatgagttattataattatgttgctgtgatacatgtagcccaagtcagaagtcacttgctttgtatttaatggatggggaagacactggagcttggagggaagagaataaaaataacctagtttcaggaagatctatgctctaaccctgcttctgccacataacaacaactctatgatttgtataagttactttacctctcaaactcgtggtttcctcgataggggataaagaaggcctatttcatagagttggtgtaaaggatttataagggctgtaagtattagttcctgccctgtttcatccccctaccctacccccacccctcatcatggctctgcaaaaacaaatatgtctcagagttggaaagacccatctggtctttctcagataagggtagttttcttcaaacagactgattcctgcacataaaatataatataaaaaaccaaaagtaccttcaacattgtagacttttcatatgtggttgtctctgtgacttaaatgtacaatctagggtttgcatgttaaggtctttcaagattactgttggcactgatctgaaagatgtctcatgcaggaaatgctcacccaattatgagcactgaggctgtatagcaatatcagaaataatattgcagcacagtattttctatggattttagatgcagtattaaaaaaagaaaactcagcctgtctttaagactcgttttctctttcaacaccagaattaaaaggcatgccattcttttttaaagtttatgtgcagagccaaatgaatatcaacattagttctccactgggtccacggcttctttttaaaaatatctgaagcagtgttactctacccactttttctcaggaaattgtgtcctttagaactggcacccatatagtttaggaatgcttgatagggtatattttaggtgggagtcacctgtgcctatatggagctttgatgtcaatgcccttgtcatttggtgtcaatggttttgtcattctaatttatttggccccaaggtgtgtgtgtgtgtgtgtgtgtgtgtgtgtgtgtgtgtgtgtgtgtttgaaacacagcatatgtatttttttcttactccttgagaaatagaactttaaataacatttctatctttaaaatgtacttgtgaatagttatcactttcctgaattctaccttccaaaggtaggacaagagaaggatggaattaaatcacacatgcagctatttttataacttatgagcactcaatgatggtagcatccctcttctttaccttctctctgattctgaagccactgctgttttggttcctgtatggctgggactgcctgtccactagacttcctgccttcactctgaccctgctacatttaccctgaacaccatcctcccaataatcattaccagatgctattttcacaatgttacacctttacacaagaagctacagtggaatattatccttacagaatcagataaaaatctccaggcggcattctaagctctcattggctacactgtaccctttgaacctgaacttcctgagaactacctcttagctcctgcctgtagctctggctcccatcttcatgcagtaggtattcgttttcttttgaacggcctcatatcttctctgctagcaggattggagtcatggcagaaagtgagagggggactagaaggatgcaacattaatgaaacctcacaataggttaggcattgggttaggtacttggttgatctactcacatcatctcatctaatctttgccaaaaccttaaaaggtaggtattatcggccctacttatagacatacaataggtacttaatgcacatttttgtgatgaataaatattcgggaatttttgcattgtgactggatgagaagaaactaggaaaaacaagacgtagatgagaaagatacctctcatcttacttccaacctaggagatcttaaatgaactcatcagttttaaaaggtaatcttaagaatggagtcagagggtcacacaaggagagaaagcatcacgtattaccagagttcgggattgcttaaggcggtttgacagtttcctccgggggtaatccaccctaggccaggcatttttaaagattagattttgaaatgaagctttgcacttgggaatatactgaggcaagaaagcatatcccttctccctgctgagagagcatatcccttctctctgctgttgcagtgcttaagtgtgagaattttcgaatgagatatgaaagcaaagacaacaaaccctgcaggataatagtctctgaggactttaataacagccgtttttaaagcaaagcctgtggactcctaaatccatagctgctcgtttaagatgcaacgcaatgcagtggacctgaaaacatactccttatctacctagagcaaccaggctccaagccaaacagcagtcctcaaattaactcttgtttctcttgggacgacaactctgctgcttttaaaggtgttgcgtggccacatatagaataagaagggaaaaaacagtcacaccctcttgtgagtctgtatccaactgcattttctgatctggttaggaacctccggtggttagattagaatcctgataaggccaagactgtgggtccaatttcttcctatggattcttctcgaaaaacttgttaggaaagatccacttcgggtttttttttttttttttttgcgcttgttttaattcccaatccataatagactgatacttttgtaacatgcaataaaaatgaattattttaaaaattacaaataccagacatacaaaatttaagccgatgctttttatttttagattgctgtacacgtttctaaagatttgctttcaatttctgttcttatgtcttcataatagaatatctgtttctgtgtgtgtatacgtatgagtgtatgcaagtgtgctccaaaagctctactatttagagctcatgtttaatgagtcatgttggataaccagtctaagggagttctactttcatataattgtttttgttttatttttatttaaatcattaacaccttttcaaaacaactgtatcaaataacagtcatttggtcatttgaagcatttacatacactgctttcttcttaaacagattttactgaatgtaaatctgctttccctggctaattcagcatcatcatcctgagcattaactattttgcttcgctataaaacgaggtgatgccttcaagggctactgatgcatggagagctgttagtttccacactgtgtgaccctggtcaattatgcatgcccatggctccttttacacctttctgattctctgtaaggtgtcacttcttcctactctcaatttagccacttaggataatttctttactattttgaattgtatgttcctgaccttctaagttcttagaaatcagaccactttttttcccatcaagctaatttaaattagataaaaattatcagtaaggaggaactaatggccttataattattcatatactaactgctttcagaaaagcttagagataatctgtctataataaaattcttaaggagatttggtcacttattgttattctttctacaccattgtgtttgtttccttacttctcagctatattaaaatggggaagttttcatttgctgagtcctattttagagaccaataattccatttacataggaaaggaaatatgtggatacgattattcatgatgttctagaatagtatcacaaccatctgcttaatggttaataaaatggttaataataaaaagaagggtacagcactaattcttgacatctcccttctttatttttcttctagtaaaacatccataacttttcctattcttccccagttgtattattacttatgaacaccatggatcattctactttttgaatgaaatagtacaaatttaatattcgataatcttgtctttgtacttttctttctaaacttttattctcggtggcttcctaaaggaagactttattctacttggtttaagcagttggtctgcattctacctatttctctcaactctcattgtccattccaatcaggttgtgcaattcattgtccctgctcataaaccaaattcatttcacctttactccattcccatgctattctttttacctggaatattttcttttgttccaatttcccaatcgtatacatccctcaaggctcaagccaagtcctgtaacttcatgaaatctatttctaacatctgatttccacatggattatcttgtaatagtaagccctgcatttgctattatttattaaagatctcttgtgttctagacgctattcaaagtattttacaaaaattccatgtaatattcaaaaaattcagcaggtatgtattattatttcatgtttagtgaaaccaaagtaatgaaagagttttcatcattatgtggctaataagggaaagagaagagaagggtcaaacctatgtctatttaactgcactttgccatgagttttctctggaagctgagaaaggagattcacaacaagagtagatgagactcagataagaaggaagtgtggaatttgaaaaagcccttcagaaaacaggatctcccctactcctaaaactgctatactgtgaacatattgcttgtctcataactgaacttttttggtactctcagctgaaatttgctctataattgtacagaactttaggccaaatgtttcttttatggggacacacattatttgtttcgtttgcacccattttctcaattactttgtgttttctcttgttgtattggatgcatctctatccactgctacaaatctgtttaatagtctttatattaataagaccatgaaattgctctttgtgtgctgacatagttatcctttattttctaatggcagtgctagatttgctaaaatttaggtagtagcattattaataggaaaaactaccaccaacaactaaacttgaaaggtaatatagcctagtggctaagagcacaatccctgaagtctgactgacgaggttctaaatcttgctgcatttattagctgtgtgaacctgggcatttttagttaaccttacagtagtttcattatcttatatggaaaatgaagataatagtagcccctaccctagagggttgttgagaggagaaaatgagctcatgtatatacagtgctttggacagcacctgatgtacagtaaggttcatgtatgttgttgttcttgctgctgctgctgctgctatggtttttgttatgtaacaactaccttttcccctttgttcattcgttattgcttttcctaaagactacaatcacaaaaaagaagaaaaaaattagagagcatacagtgaatgcagtaatgaaggcttgaatgatcttttctagttaagtcagaagtgaaataaaactatccaaaaatttctatgaaaattatcctttgtccagattggctacccactgagaactccacttgattctccatatcaatcttttgctcttttgtgctacctgagtctgaggtgtagtctttaaatgatgagtttattggcacaagacagggatgccctctctcaccactcctattcaacatagtgttggaagttctggccagggcaatcaggcaggagaaggaaataaagggtattcaattaggaaaagaggaagtcaaattgtccctgtttgcagacgacatgattgtatatctagaaaaccccatcgtctcagcccaaaatctccttaagctgataagcaacttcagcaaagtctcaggatacaaaatcaatgtacaaaaatcacaagcattcttatacaccaacaacagacaaacagagagccaaatcatgagtgaactcccattcacaattgcttcaaagagaataaaatacctaggaatgcaacttacaagggatgtgaaggacctcttcaaggagaactacaaaccactgctcaaggaaataaaagaggacacaaacaaatggaagaacattccatgctcatgggtaggaagaatcaatattgtgaaaatggccatactgcccaaggtgatttacagattcaatgccatccccatcaagctaccaatgcctttcttcacagaattggaaaaaactactttaaagttcatatggaaccaaaaaagagcccacatcgccaagtcaatcctgagccaaaagaacaaagctggaggcatcacactagctgacttcaaactatactacaaggctacagtaaccaaaacaacatggtactggtaccaaaacagagatatagatcagtggaacagaacagagccctcagaaataatgccgcatatctacaactatctgatctttaacaaacctgagaaaaacaagcaatggggaaaggattccctatttaataaatggtgctgggaaaactggctagccatatgtagaaagctgaaactggatcccttccttacaccttatacaaaaatcaattcaagatggattaaagacttaaacgttagacctaaaaccataaaaaccctagaagaaaacctaggcattaccattcaggacataggcatgggcaaggacttcatgtctaaaacaccaaaagcaatggcaacaaaagccagaattgacaaatgggatctaattaaactaaagagcttctgcacagcaaaagaaactaccatcagagtgaacaggcaacctacaacatgggagaaaattttcgcaacctactcatctgacaaagggctaatatccagaatctacaatgaactcaaacaaatgtacaagaaaaaaacaaacaaccccatcaaaaagtgggtgaaggacatgaacagacacttctcaaaagaagacatttatgcagccaaaagacacatgaaaaaatgctcaccatcactggccatcagagaaatgcaaatcaaaaccacaatgagataccatctcacaccagttagaatggcaatcatttaaaagtcaggaaacaacaggtgctggagaggatgtggagaaataggaacacttctacactgttggtgggactgtaaactagttcaaccattgtggaagtcagtgtggcgattcctcagggatctagaactagaaataccatttgacccagccatcccattactgggtatatacccaaaggactataaatcatgctgctataaagacacatgcacacgtatgtttattgcggcactattcacaatagcaaagacttggaaccaacccaaatgtccaacagtgatagactggattaagaaaatgtggcacatatacaccatggaatactatgcagccataaaaaaaggatgagttcacatcctttgtagggacatggatgaaattggaaatcattattctcagtaaactatcacaagaacagaacaccaaacaccgcatattctcactcataggtgggaattgaacaatgagaacacatggacacaggaaggggaacatcacactctggggactgttgtggggtggggggaggggggagggatagcattgggagatatacctaatgctagatgatgagttagtgggtgcagcgcaccagcatggcacatgtatacatatgtaactaacctgcacgttgtgcacatgtaccctaaaatttaaagtataataataataataaataaataaataaataaataaaaaatgatgagtttagacaaatatcattatggtagtattatattatgttatgttatattatattatattatattatgtataatgtatattccttgcagcctgccctgcattcccaatctatgactcatgctgccttattgatactgaaaaatctccactacagcatgccagcttttgaaagagagccttgggttctttcccaatacttaccttccttttagggcaacctatctgagtcctgtagcttgaaagatttcctaccagcctgccatcccaaaggaacatggatgaactatgtttatgctgatgtgtcaagtcatttcttggtatggttcatagtagtccacatggctcttgtagacaaagagatgaattactgatggcagaatttctgttctggcaacagggaaatttgcagaaaggagaccttttcagtgtgaacattttttgctcacaggtggtccaggatgcccaatgctaaatgagaagtgaaaagagcaatcagggccaggtgtggtggctcacgcctgtaatccaagcactttgggaggccaaggtgggcggatcacgaggtcaggagatcgagaccatcctggctaacatggtgaaaccctgtttctactaaaaatacaaaaaaaattagccaggcgtggtggcgggcgcctatagtcccagctacttgggaggctgaggcaggagaatggcgtgaacctgggaggcggagcttgcagtgagccaagatcgcgccactgtgctccagcctgggtgacagagcgagactctgtctcaaaaaaaaaaaaaaaaaaagagcagtcagaattcaatttttcattcagaacaaatcaatccacgtgggtaaacattttatcaaactcaagaatgctgtctttcagggtgcttttccctcaacagtcacttatttcctcttgcaagtagtatcttcgttcaggttcagtgactactgtgtattatatccaatgcttctggcaagtgggttggtggaggcagcccaagatcttctagaatcaagagaattggatccatttcccagttctaacacttatcagctatatggcttttaggcaagtcagttaaacatccgagtctcagtgctctcatctgcaaaacagaaaatgtgatgtacttcacagagccagggggaggaataactaaggtggtacatttgtacgtgctttgtaacctgtaaagccctttactgtacacgtgtcatttacagctctgtatcaccatcatgacctagaaaagcagtactgacagaagacttatcttcttgccaatgctaagataactttagccatttctgcatttctaaaggaaggagtctttatcccagtatctatgaagacttggcaggaattgccgtcaatatttagttggtaatataaacgaattaaacaaaaatgcacactaggttttaggaaaattaaagacagaactatcatttgtactcctcttacatttcccaaagtgctaaaactagacaataaatcagtcctcaataaatgcttgtttatcaattttatattcatttatttgttgataatacaacaaagatgtttatatgcagtataatatatatggcaaagatgaaaagtagcaaattcatgaatcaacatcctatttatgcttgagaagacaaagaaagtgttggtgacttcatggtatacataaccttaaggagctcgtgattgagcctgggtctctgctatcaatgtaggatataaatttcaaatgtactatcctttatatgtatgttaatgtagtaaacatagaaaactgatgctactagtgagaatacttttacttgaacaactaaaagtttgtctttaatcccctaagtgcatacacaaaaggaaagtactgtacaaatcaagtacaacagaagaagtaaagtaaaagacaagtgaaggaattatctggaacttagatctggttggctttttctcctgaagtacttagataaattaactcacttttctcttttgctgaagaagtgcaaattaggcaggcatgttattccacgtaggcaaaaggaaaaaagaaagaaaaacataaaatggctatatatttgaccaaacttcgttctgcaagaatcccaatactaaccttctaccatataaactactttcaaaatcaggctatatccttccagtacaaacctggtttgtactactcagagatactactcagaaatactttcagtatttcccttctttcaacttctgatgtgattctatccatattcccctgcctgtctcccagtcaaagagaatgggacacaactctctttagagtccatcagtgatgctttagctgccaaaaatagtgacaatagacattcattgtctgtctaccttacttgttcaacattcagaattctgcatcttaagaggctgtggctgaaaacttgagccagttcttcagaatttctaacatgttatttctgccactttttctcccttactttagcagagtaatttaattcaatttgagagagagagagaaaaaaaaaacttttctagttacacagatcaatccaattgtttggagcttcagaatgaatttttaaacttgttgaacagaagcatacaaatctctaagagcaagtcagataatatacaaagcctccattcattgtgtaggcagaaaggaatgctggtacccggcagctctctgaggaatgttcccttggctttgactattctgctgggaacaaggaaggaaacacatatataaaatgaatttataatgtctctggcttgtaatggcagaatgataagaaaagttggctgtttaatataaactgtcagttgcatattccaggcctcctctctttgaggttcctcccacatccacacgcctggctactgtttagtgcggagtacaaagtggccgtttattattattgactggtgaggcctgtgctccaaaattcattctgtcaacagaatgtaagcaaagttggcattttaaagcagggctctttcagtttctgggttttctcaggattgctatgcaacaggatcagtgctgtagtgcccggttcaagctgaaaatgttacacaggaagacataccatgtaaaggtcagattcttctactataataattttcttgatctgtgtgtatacaagtgaagttgaatgcataacctcttatcataactcttaccaaggtcctatgtactttccacctgtcaagcctaaaaatgtgtattaaatgggaaatcaaaactaataaatgtatgatgctgtactatatgtatgatgctataataccaaggtgaacttaatttgtgttgtcaagaagattttctctcccatgacagactcccaggaatgtgctggtgctgtgggccaagtgcaatcttgtttattagtctctccacgcttttatggtcagagttaactctacagattactacgtaaatagaaaatatgacttgatccatatagtaatgaaattattggcactggggtacactttatcatagaattttattgcctatcacttccataaaataatacattttgtccatagactagaagatataacttgtgaactttataaagttataaatacattactttccaactcataatggcaaggaataaatctattacaactaataagatgcccattttaaatctacataataacaggagaaggcaatacgccaagaaaagggatttgagatgtatcttcttgttagtttagcctgattgaaatgtcttttgaactaataattatttatattttgcaattctccaaattcacattcatcgcttgtttcttttgtttggtaattctgcacatattcttcttcctgctgtcctgtaggacctccaaggtgaaattgaagctcacacagatgtttatcacaacctggatgaaaacagccaaaaaatcctgagatccctggaaggttccgatgatgcagtcctgttacaaagacgtttggataacatgaacttcaagtggagtgaacttcggaaaaagtctctcaacattaggtaggaaaagatgtggagcaaaaaggccacaaatgaattaaaatggccaaattttcctcattgtcttagcacaagtaactggtatctcacatgtctacgtaaatcatccaatttcagaatgattcactgtattttgaataaatgaatcatttatttgcttggtatggagatgatacttgaggattcagattagattaaagtggtaatgttttataaacataggagacatgcatattaagacatcagagtgaatttaaatgaggagtgcagctattctagtttcataaatttctctcttggcatatcacagggttatacaaaaagtgataaaaaattaacggatatgtattatggaattatttttggcattagtctaaatgcataccagaggacagtctttaaaaccctttataacacattacaattatataatataaaacctgtaacacattataattaacagtttagaggagatagctcctacagttaaagagagactatagcaacttcctgtcttttgcttcctctcagattttgttaaaacacatcctctgtaaactaagcttttagttgtagtatactcacatactttatattttgcccccttctatgtgccagctttctttggagaagttagttaatggatgcatcatagcatctttgtaaaaagggcagagggaagttcttgttataccagttttgcaatagttccgtggaggaacaaaaggatagagatagtaagtaaaacgcccattgtaacttaaatgatctagcaagggcggggaatgaaagccaggcttcctgctttctaagcagttgcctttcttaattcatttctctttattaaaaatattttgtgctttcttctgtgtctagagaaaaagtgataatgaagggaggtagaagatgaccaaatggacttaataatagttatgggagtatacactaaatgacgggagtagttactacctctaggtagaaagattacagaagggagattttttttcttctttatagttcttctaacttgtccaaaattttaacatatatacttctataaggaggaaaatctgcatttttagtaattcagaagcactattgtaaatgtctgcatcaagtatgaaataatgatagcaactaatatttacatgatgtacctacataccacgcaatgccataagcactttccattcattgaccggtttaatgctctcagcaaccctaagaggtagattttattattgaattctttttacatttgaagaaagtgaggcacagagaggctaaataatttccttagggtcacttagcaagtggaagatacaagatgaaaacagggagtctgggtgggccaggcgtagtggctcacgcctgtaatcccagcactttgggaggccgaggcaggtggatcacgaggtcaagagatcgagaccatcctggccaacatggtgaaatcccgtctctaccaaaaatacaaaaattagctgggcatggtggcacgcgcctgtagtcccagctactcaggaggctgaggcaggagaatcgcttgaacccgggaggtggaggttgcagtgagccgagatcgcaccacttcactccagcctaggggacagagtgagactctgtctcaaaagaaaaaagaaaaaagtaaaagaaaaagaaatcagggagtctgacttcagagtctgaacttttaaccaccatatgataccgtagcatataaagaaagaaggaaacttctacaaagaaatgcatactaattgaaaggatgaaatagagagtagattttttctaggagtagaaaaggatttgtttttatgagaagtagattgctaggagtagaacaggtttatttttatgtataaggttttgttttgttttgtttttcacaagtttgcaccctggcttcccagacattgttccttatctccctattttgtatatgaattttgtgtcaacttggtggtggtacactgggagcaacaatggcaatagcattttcaaagatagggaggctctattagctttctacagcttaaactcttaagagaggtcagtatgtgtgatgacgtaggccactttgataaccttcgtcattaaaaaagaatgaaaatgtgagatggaaaaaatattggcaggtcaagttaagttattcttttctgcacaaaagaaaaagaaagatgctataattgttccgagtatcacttagtgccttttctctgcctcatgtgaacttgataaaataaaaggagaattgaaagtggcaaatagcatgtcagccaaaatatggactcttcattctcagcagtttcccatgtcagctaccgcagtttgattcttgctgtcattaatcaggtagaaaacagttagcttatctaaggtgctgccaattctagaatttaaatattcagatcaatggttttggcttttatataggcctatgtaataatacaggatatgttataagcactcataaaaagcaaagaagtaattctccacatcaaagcaatttagcttatttcctgacacttgattgaaattagggtattgatcaatctacagcaaatggcagggttcaattgagagaagtacagtataggcagtaattagggatgattatgaaatagaatagaataacactggaagagttagatatagaaccattagtggcactgataaacctgcattatgaatcttgtcacttcttccatgggggttattttaaaatgaaaagttgccacaattaaaaaatagtttcaatgatatactggaaaaataggcctgtgtttgcccaagttataacatattataaaaaattacagttggcccattgtttggtgagcgattctgaaactgctcttatatttcaaaaaaataaaaccattaatgtgtccatttttaaagaaacaaaattgaatttaaatccaaatgatttcgaagtttccctttgtattccattggctcataagagatatccttgtgcttccaaatacaagtccatattgtatcgttttccttccatttatttttcttctgccatacatcttttctcttcctgtgattaagattcttatttaagtcatcatgttatgccatattgatacatttgcaagaatactctaccttggacgctgtttatatcatattactcttttgttcaaagcttcaatcttgtaggtctccatatctccctcattcatttatttgttcattcaacaaatatttaatgaatgcctactatgtactaggcactcttctgggcacggaggatgcaaccatgaataaaacataccaaaaaaaatcactgctctaatgaagttatatttaatcattagaatctagtagaaccttctctctctgccaactgtgcctaataagtccttgctaactccttcccttctcttttctttttctgcctccagttcctttctcaccaagcatcattctgttactccccaacatagattctctgagccaagagaatcaataaattctattttctaaccccattcctactctccaacaatttcctcactctcccatatgagtatgtacccttgctggttctcacacttgcaacattctctttcctcttattctccaaattttgattcatattccataacaaatcttttcttttctggctgtttcctcactaggtcttcccaatactattctaatttacacttgataacatgtttcttcaagtgttcaagagttgctttatagggctatgcttactgcctccagctaacttatatgaatacaaaaatttcaaactcgaaatatgtgagtatggtagagtagaaagacatgggccagcagctgggcaacccagtttcccttctgttctattctgtcactaactgtcttagcatataatcttgatcaagtcacttaactgcttcagacttcaattttctccttcactgaaatgaagagtttgaccagaaatatggacagtctcttccagttctcttgcaatcgtacaattttattcttttagttctgcaatcacactttatgaacctggaaaattgtttaatttttctaccttggttttcttaattaaaatagaactgattgatttaaaaggcattatataaagtaattaagatgtctttgagagaaaagaaatttaattgaaattgtataatcctatctcataatttaattcaagaaaagtatatgctatcattccacatgcattattacatcacatgttggccaagaggtataaggaagaaaagtaagtagtcagtgataatttaagttccatcaaacaaaacgaaaacattaactgctttaagtgggagaaaaagagaaaattatttacttaaatgtacacacacatgcatacacacacagttactgatgacgttatccaatattaagatggtaattagtcaaagaaagtgtttttcattctaaaattccatatccacaatccttgcatttttaattttagaatattaataacttgagaagtggtcaagtcaattgttttacataagaaatatatatgaagatttcaatttagtctactactagattatttttccagatcattgtatatactattaactatgaaaatcacataatatgttatcaacataatttcagcagaatttacattatgtgagatttttatatttggcagaaaaatttgtaaatgttatataaaatgttcacatttatacaattgtgaacattaagaggcaaggacactgacattatatagtctgtagaagccataaatctattggggagtgcttgctattagaggttagaatagttagtgtctttgtataatggagaacaaaagaagggcaaaaagaggtggggtctacctttgagagaaaactgcaacttggacattgaatatctctgaccttctttctctctcttttagaatgttaattatgtttggatgttggagttcaagacctgtctagaaaaaaaaaatgttgacttctctttgggattctctctatttaaagagatagctcccattttaattctgtggttctttaattttttttgtttctgaagtacaaattcaaattattcatctgttgatgacaccctggagatttttctcagtgttctcttgtagtagtttcatggtttgaggtcttacatttaagtctttaatctactttgatttgatttttgtatatggtgagagataggggtctagattcattctgcatatggatatccagtttttccgcaccatttgttgaagagactgtcttttccccactgtatgttcttggcacctttgtcaaaaatgagttaactgtaggtgtgtggattcgtttttgggttctctagtcttttccatgggtctttgtgtctgtttttatggcagtattgtggttctttattatttctgcattcctcccttttctttctgcatgtttaagtgctattttattacatgagggtactaaagatttatagggatatatcattagttttataaaggaagtcaaagtgaaaaatgaattcaatataacacatttcactttaagaatgcatgcctttcagagtaaagttttattaaggatttcaaactaggcattaaccaaatcacagttgaaatatctgtgtctagagaaataacaatcactttatcagcccctataattcttagtgtcctgacactgaggagttccttaaagaccaagcaatatactccagcacatctaaaggctctgcgttttacctaaaccttacaaattgtggaaattatcagctttttagagattagcacttgccttgttaaacggtagtaacccctaagctcttgtcttcactaataaagattaatagacatagatagaagctaagcatgcccctttgaaccacctcttttattttccgttgagtgggtaggagtaagcagaatatatttgacaattagcaatgttaaaagacaaactttagacaaattccgttttgcagagtttatttgagcaaaaaacaattcatgaatcagacagtactcagaattagaagttcagaaagctccacccagcaaggtgggcaggcagtatttatagatagaaaaaggaagtgacatacagaaacagcttgactggttacagcttagaatttgccttacttgggcatagtgtaaataggcatttgccttatatggacatgagctgatcagtttacagcctgtgattagctgaaacttgactgctgggattggctgaggctcagctatttgttacaagaatgtactcttaagttgcatattgcttacatgccaagctgggttgcagtttgctatgtacagagtcagctttaggcccaatttaatttaatttaacagcaacaagcctttttgttcagagatcaaaaacatttggttaaaaccactaaggtttaaggattttctcatctaacaaaggtttgtaatttctatttcccatatctaaataggacagctcaagttatgtttttcagcagctgttttatacctttgcaatcttgatttctacatatgcaaaacaagaaggttgaactataatctctcaggttccttccaaccccaacagcctatgtatgatataaccagaaaaaaaagtcattacaaatacaaagaaacattttcaggaggagatattccacatgcaaacataggttaatcatttcaaaatatctggtatatacactcatgaaaataaaaatagggcaactgcttccgataaatgtattagaaatgtgacttgaaaacatttcacgggcttaacatggtcaaagaaaatgttttgagctcacaatgttccttacatttagatcttcaaaatcaagtcactgacaaatgccacctttgccctgtggagaccaagaagtaatgtttggggcatatcagaaatgctttaataaatgctttatcaaagaatggttctggagcttacctgtggaattgtgaaggttcttgttgaaagcagagattgttgatagaattatagaaagtctggaggtggcacctagcaatctcaattttaaacaagctactcaaatgtttcttatacacactatagtttgagacccagagctttaggttgaatacatttgtatatgctgttttaattcattctctggctgcctttcacctcttcagttcttactcagtgttctctgtcctttgtaagtttttcgcttcagtttttgtcctcctatcacatttttcctttcactcttgagctttaggagaggaaaaaaatgaagcaatttgatatgtagttaggatgatcaaacattctgaaattttatctaactccacagcttagaaaaaaattaaaggaagtccccttacccagatatgtgagagcttttcgtcttttgaggttccaggtccgtcttctgctgctgtattagctctcttgactgtcctctgtccctggcttctaacaacttccctatttcatgctattaagtttctcttagatcctttagaactgaattcccggctgggtgtggtagcttacgcctctactcccaacactttgggaggctgaggcaggtggatcacctgaggtcaagagttcaagaccagcctggccagcatggcgaaaccccatctctactaaaaataccaaaaattagctgggtgtggtggtgggcgcctgtaatcccagccacttgggaggctgatgcaggagaattgcttgaacccgggaggtggaggtgcagtgagccaagatcgtgccattgcactccagcctgggtgatagatcaagactctgtctcaccaaaaaaaaaaaaaaaaaagaactgaattccctaggtctcagttattttgctctctcttaggggacctaaaggggttcattgacccactaataatgagtcagcaccatttaacctagaactggaattttagcacttccttacataaacaaagccgcagcttgaggtcttaacataggcagcctgcccttcactatatcctcctctagacctctctgccacaaggatattttgtttcctctaccaggcagacagaggccaaacattagtcatcgttatattctctcttcccttcctctctccctactccccaatgtatcctagagacttaggggcagtcaataaatatttatttaatcagtgtcttttctaccatttgctgcttttccatgtctgagccctacctctctccacctacttttcaatatgtcctgcttgacagcctcttttcactctcaaagggaccaagctgtgaattccagacaccccaaggaattcgtttaaccattacacattacatgctattaaacagctaaaatcttgcatggggaattgtcgcttaggcttatcatggaaaagtggtaactgaaaggatggtacagaaacataaaagaactgacctctaattgtatgcaatctgcatgcactattatattcaattcatgacatttatggtatttcacgattcagttcttgggaaataatacccttagagtctggaacaatttaatttatcttatttgatggaaatgccttcatttttcctggacatattgtttatactgcaattatagaaagaaaatcttgacaatttggaaaagtagaaagattaagaaataaatcacctgtaaatctacctctgagggataacctggttgtcattacaaaattttttcctagtcaagcatgtgcatacaaatacatacacatacacaaatgttttagaaaaattcaaaaaatgtatttgttttgtaacctgttttctcatttagtaactgggatgatgaccttttccatatccataaatatttggctatgtcatcatattgaaccttgcaaaggattttactgtatgaatgcaccattatatatgtaataattcccttttaaattaagagctatttaattaaattcatatataaatttcattaatttctaaatttaaagcatatacaagtttcattacatttgaaaacaatcagtaggttggggttttgcatttctcaagcaattccctcatattgaatatttaagttgtttctgttttgttttatcaatcataaatgatgctatatataacatttttccacctatatctttgtatctttttccaatttctttgttagtataatttccttgaatttaagcctgtgggtcattgtctttgcacattttaaagacttttatgtattgtcaaattatccttcagaaagtttggaacaatttaatttcagtagataagtattctttggtgattctgtttgactaaggccaaaaggagaattgtatttgtaatgtcaagctaagttaccaaatggctaagggaaatgttgctccacctggttgctttgctttacatttcaatctttgcagcgttaaagtctttattatatttatgttataggtagcgttattatgaattaattagtaattgctgataatagctgagtgattgagcataatttctaatttacctgaagataaagctttgctaacactgcgtttcctctttgttttctggatgatgatttattttattaatttagcttctcatcttcaagtgaaatgtggattttatagcacagatcattcatttgtgtattcttaaatggcttctaaggattaacgtgttctaaatacagttgacggtaaagcactcagtctcctgcctaaattattcatgttcgggggaagctttcagataaatgtctgattttactcttccatgtgagttgttgtcttagtactttttacacaaaggaaacaaagcagaaaatgttgaaacttggtgaagacaaatcccaggtgcacacaaataaagaagggtagggggaaaggagacgcatttgggaagaggagcagaaaggaacagacgccagatggaagaactcaatggaaaaggctgcctagggtgtagaaatggaaaagtcaaaatgtggggagagacctttccatttctcaaggcaaaaagaattccagtactagcatgagtcacatgaaaacgaagtgtttttcattagtcactgcatccaattttttctaccagaaatattaagaattgttgactacaacagtatggaaaagcaatagattccagtgtgtatttcatgccaaaagtctcagcattctgcatgtggaaataaacatatggctaaacactgccttttctcaaaattgccatcaaactatcctctgttttgtggctctcaaaagtaagtagccagatttttattcaagactgctttgtagttcacaataggtttattgtactttttcaatggaattgttagaatcatcaattacacttctagatattctgacatggtacgctgctgttctttttcaggtcccatttggaagccagttctgaccagtggaagcgtctgcacctttctctgcaggaacttctggtgtggctacagctgaaagatgatgaattaagccggcaggcacctattggaggcgactttccagcagttcagaagcagaacgatgtacatagggtaggacatttttaagcctcgtgccttgcacatgttaagcacatagtaatccagtgactattttaaaattaattttgtttgaaattaagttgaatagaaatcttttttactcttctcacccaagggtcaattataaataatctaagccattacactgtaaatgtcaaacacatttgtgttaataataccctttaagaaatcgtccatctcttttggctatataaaaaaaagcttttcatgatgaaaaatattgaacatatacaaaagtagacagaatgctataataaaactcgtactcatcaagacatcaacaattatcaaatcacgtcagatcttatttattctatagctcttcccagattgttttaaaacaaatatcaggcgtgtgttattttattgttaatatttcaaaaggttaaaagataggattcactcttttaaggtaatcaccttgctactataatgcttttgaaatatcaataatttcatcatatcaaatatccagtccatattcaaatttccatttttctcatacatattatgcattttttaaactttttctggttttggtttaaataaaaattgaaatcagacccacaccttactttggttagttggtctttttattactttttgtttggaagtaattacagattcacagtaagtttctaaaatagaatagtttccctgtatctttcaccctgtttcttttcatcattatatgtcatgcaactgtagtacaattcttattgtcatttcaacatgcaatcaatagaaaaaatgtacatttacagcacatctcaattcaggctcattacattccaagtactcagtagccagatgttgccagtagctaccgattgaacagtgcagttctatagtttgattgtatttgggtttggctttttttggcaagactgcttcacaggtgttcgtgtattcttccatcatcaggaggtggtatataatgccttgttttctctttttgtgtgatgtttaatagctgttcacgatcagtggctaggggttgcagtgtgataattgcctatctctaccattccttcttcatttattcactggggtaggtctatgaaaaaaatgttttgcacttgtctcctattttggtactcagtatacctttcataccgaacaagcaaaatacgtttcaattttaccaatttttataataacaacttgttcactagcatcctccaacgatgaccaattatttctttgtttgtttgttttatttttatttacatttctatcttctctactaagctctgagtgaaaaaggcagagattttgtcttgttcacctccaagaccctagagtctagtaaagtgtctggtgtagagtggatactgataagtgttttggaaatgagaataaaagatacaagaacagaaatgaatagcaaaccaaacaaattactaccaaataataaaaacttgataaaatggtaccacttttgtatgttgagcatgtaaaggaaagatctctgtggagatacagccaaaggtggcatcttgaggaaaggtcaagggtttatattattctggagaagaggatataggaaattataaaaagggaagagaacatgaaagaagacccagggatctttgcaaaaaaaaaaaaaaatgccagggaaactgccagtttctcctttagccatttgccttcatatatttctgaatattaaattagcttttgtggtagggtgaaatgtaatggtgctatgtgttttaaatgttctgactttgaataaacagccaaaacactctggtgtacatatagaaaagcactcattgagaaggatgggccttttttaaaaaatgcattatgcgatatagtgaaatgagacagaatttctacaaaagatgaattttatgctagttccagaaaccaaagaaaatgaatcactggacatgtgcactaggagtcaggagactgagattctagtcatatttcttcataagatggattctgattgctattttgttcttcaactgtaatatgaggaaattggtccaaataattgctgtggtttcttccagccagtattttgttataaatactgcttcactattcctggttattagttttggttgcttgttaagagtggtaaaatgtctgtacttaacgcagtccttactcaggaatctcatgacaaagaacatgacttggggagatggtgatgctagagttatgagtgatactcaccagaatgaagttaatccgtccccacttggttagtgtgcttgctcagatagctacctgttaacctttcgtgaatttcacaggacttccagcccattgattactctgtgttttatacattagttcctctgcccttccatatttacctccttccaaatacaacttagattcaatcatctaaattttaataacttgttttcaaaagtctgaaaccctttgcttctttatctttttgttgctgcaatctacaaaactccaaaactctagctaaatattccgagactctaactaaatattttctcataccagacaacaatgtagttgtctggtacagtaccttttccggatgaccagccttcagccttccactaccaagacatcactgggtcaatttttttttttttttttttttgagactgggtcttgctctgtcaccaggctggagttgcaatggcacaatcttggctcactgcaacctccgcctcctggttcaagcaattctcccgcctcagcctcccgagtagctgggactacaggcacgcgccaccatgcccacctaatgtttgtatttttagtagagacagggtttcaccgtgttggccagatggtctcgatctcttgacctcgtgatctgcctgtcttggcctcccaaagtgctgggattacaggcgtgagccaccgcacctggccaatttaccttcaaaattgtttttgactgtctactattgttatcatcataattatagaagaccatttctcctaacctttctgcatctactcttgccaccctacaatgcaatctctacatttcagtcagaataatctgtgtaaaaaacataaatccaattatatcagtccttatcttaacactatagtagtcttctcagtgctcttggaaaaagaccaaaatcctcaacaagggtgacaaggcactatctggcttgtctggcctcagcctcctctttcctagatgctcttcccttgctgtttggatgccagccatactgcctccatttactttttccaattctgcgtgtccctcttatgtggggctttaaatatgttggtcctctgtctcaaacccttttacctatacccacccactcataatatcctggttatcatctaataatcctttacatcttggctcggacattgtgcaaacttttccctgttgtctacatttgaccagatctttctttacacacttctaaaattgtctacttttctataacatagcgttgtttgtcatcacgtacatgtgttactatttgataaatatcgactactcttgctaaaccatgtccttcaagaagatttttgggagggggaaagctgtcatttttctactcagcacattccaaagtgcctagtatacagtagacactggttagataaaggaaggctattgagaccaagagcagggaaagaaagaatagagtggtattcccttcttatttacaggagttttctgtttatttctaattaagcatctttttgtaaagtgtgtagagctactttgatgcacaggtttttttttattattatactttacattctgggatacatgtgcagaaagtgcaggtttgttacataggtatacatgtgccatggtggtttgccacacccatcaacccgtcatctacattaggtatttctcctaatgctatccctcccctagccccccaccccctgacaggccccagtgtgtgatgttcccctccctgtgtccatatgttttcattgtttatctcccacttatgagtgagaccatgcagtgtttggttttcggttcctctgttagtttgctgagaatgatggtttccagcttcatccatgtccctgcaaaggacatgatctcatccttttttatggcttcacagtattccatggtgtacatgtgccacattttcttaatccagtatatcattgatgggcatttgggttggttccacgcctttgctattgtgaatggtgcttcaataaacatacgacatacagcttttacttgtagtttggcgcaatgctttttcaagcttctcttggtatctttaagaaaaattcttgacacaaaacactctccttcctcaaacaacatcatcgctcctgagtgctgatgagagaacagtttagtagcctgtttgactcaaagttttgtcacatgtatgtggtagccctttcatatatggactgtctagttagtgatgctcttgaagcctatgggcaaaagaacaatggaaaatccttgaaactggatctgcgtatcagatctcctgaactcagttagaaaaagagaaaaagaacagaatcagtacaaaattccatcaagatctaatagttgacagatcttatatttgtggacttttgttttactttgccatgtttccagaattgtacattgtattgctctttatgggtttcttgatttaattgttgtttgtatagaatccttggtatcaagatgggtcactgtaattgtaaacttattccgcaagtatttagagtgccacttttttaaaaagtcatctgcttactctctattctaaattattaatatcctttgctgatgctttttatggggatacaaatcccattaaaatgtcaatagttgaaactaaaatcaaatgttgttcattttcactttcattttctataaatcaggatgtttacaaaacaggtaatttgtgtttttctttgtataccatttcagattagtgataatattttgtagcaaaatattacatatcttgtactcttttcttgtagagaaaatatacagtcaatatcaattgctgtcatggagagatatatggttcttctgtaggtaaaattccaagatactccacagacatatttggggaccatagtctcactcctcaaagcaattttcacacccatgggagtagatctgtgctccccaaaccagctgggcagcataacaactgcaactgaatggctctcaagactaattaataaaataatgctccagatgcggtgaagtgttataaataattaaagctcaaatatgccttagcaaatataaactgaccaatttttatgtcttttgaatacattatcctggcttttacagttcctcattacttgcctcactagactgactcgttttcaattagtgggtgttattctggtccagatatattttaaaaactgacttcctttgttttacttgagcagtcactaaagtgatatttattacttgtctacttctgtgattaacctagagagagttttaaaggagcaaatcatagtggggaatttctaaggagaactgcaataaaacatcagcttattcaactcccttcctcctaccccaaatccaaatggagattagatcttgattgtaacaacagtgtaggtaatgactttttgtttgcctttttactaatgaaattgtttgtcactaggttttcatctttcaattaaaaaaatctctataatcccttccctagagatcattaaggataccttcaaagcttcccgagattttctggttaagatttagatggaagtaatcaatacatacattattaaaagagtggacagaaagccattattgcttggatgctgttgacaaatgaaaaggcttgaataaagtagtttacttgttcatttgtcaggtcatatattatgcatgttcgatttcttcagaagtcaccacaaagtgagagacaggctgagaaattcaataaaattatcctgaaatcatgttgtagattatacatttatttaggctcattctgttatcagtgctggcctgcttacgtgggatacattttagtatgtatgttagcttgacgagttttctgtgttttctttttacagaaagagaaaatatctttggatgtcatttgtgaatgttaagatttaagtcagctctgtgttaagaaaaatgcgttgttccctatcacctctgaaaaacaaccaaaagttgcgatagagtgattcattcttttttcttttctttttatttattttttctttaatttttttttgagatggagtctcgcctgcagcccaggctggagtgcagcggtgcgatctcggctcaccgcaagctccacctcctgggttcacgccattctccttctcctgcctcagctgggactacaggcacccaccaccacacctggctaatgttttgtatttttagtagagacggggtttcaccgtgttagccaggatggtctcgatctcctgacctcgtgatccacccgcctcagcctcccaaagtgctgggattacaggcgtgagccaccgcgcccggccagagtgattcattctaacattcaatgacctggcctcttagagtttctaaaccacttgactgttagttatatctactctaaggtgtctttttagccgcgttggaggaaatagacgtctttttgatctattcttcatcatttttgtataagtttgatatcctatgcagtcatatttagggatgctgaatagaaatgacttaaaaattatttttagaactgcatttctaggcatttgagtcttctgaaaactaagtctaagtcttctgaaaactagctttatcatcaaaactgaagaactgagtcatctaggaattgctgctttgctttaatgactgtaacaagatgagatgtgaataatttacaaactgacttctctaccagtcttctctctcactttgtcaaaatattttgatgtcctgacaaatactctttaaaacagtatctgcatagtgttttgccttgacaaagcacttttacacacattattcatttaattacaaatgatccccttgatttttttctgtgctcttccttttgtcccccaaaaacattattttaggaaaaattataccataactcagattcctagaatttattggttctttcaagaactttttttatgaagagcctactctatgttaagcatatgttagggaacaaaatgagtctctgcccctatggatgtttagattttagtgacagaaatacatagtaaacccataaattaatatatgaaattatgttgggtagtaagtgctatgaagagaaaataaacaaagcatgaatagagaaagattgaggagtactggcctatgtgaggaggttattttggggtaaagacttgtgtgaggccgggtgcagtggctcatgcctgtaatcccagcactttgggtggctgaaacaggcagatccctggacgtcaagagttcgaaaccagcctggccaacatagtgaaactacgtttctaccaaaaactagctgggcgtggtgacacgtgcctgtagtcccagctacccaggaggctgaggtaccagaatcgcttgaacttgggaggcggaggttgaagtgaaccaagattgtgccactgcactctagcctgggtggcagagtgagaccctgtctcaaaaaaacaaacaaacaaaacctgtgtgagtgagtaaaccatgcaaaaaccttgaatgaagaggattctaggcagaagaagcaccaaattcaaaagcccaatggtaagaacaggttttgagtgttgtagaaatagcaagatgagctgtgtatctcaagggaaataagatcagtagacagtgataggttctagaaagagggaaaggccagataatgaatggtcttgcaggccatagtttggaggtggattttattctgtgagtaaagagacatcactggaagtaaggaaacatcactggaaggctctcagcagggatgatgtgatctgatttatgtgtttagaagttgactcttgctgctatggagaattgactataaaaagagcgaaactgaagacacagaaaaggagggtggtggagtcatctcagaaggaaatgattacttggactagagtggaaatgataggtatggtgaataattatttgatcgaagatatatttggagggtagaattgatagaacttaagatagatagaatgtggagtttgagaggaagcaaagagtcaaggaaaattctgaggtcaatggcttgaacaaataaaataatgatgttgccatctgagaaagacttgggaatgatcacgtttgagtgtatgtgcttagaatgaaccagggttccatttttggattatgttgatagacagacacaaagggtatgattcagatattatttaccacttatacttgacaatctcaaattttggctcagtatcttgagaacatacacaaattaatttgtcacagggttttctaataatccattcatttctactaacatttcagaagtaatttccaaatcttaaagtttaggcttaatgacctaagacctaattccctaaatggccacgggaactagattgagttttcaccagtgatctctcaaggtcagctcagaacttaacaacattattgtcagtaggaagtaacttccccagtgattgttggaagcagcccagccttagaattaagagtcaaacagctgttcaagatgctgtgtgcgcagtaaactattcctccatagtatcacagacctgcaagcaggctggactattctagcccgtgcccttgatctcagagaatacaatctttgttttcaaagacttccagaaaaataaatctcaacacagagtttgttaaacacattttccccttatacactcaaaaatgttttttcattgactataattagatttttaaaaaaaaaacataatttcaggcctgaaatatgttcatttacttttcaattttacatcaaatttattcaatctcatttataaattaatattgttgttcatgttgttgactatctgaaacaatgaatggatgtatctgatacttcaatcccttatcttcacttttattcagaagtggagtgaaaataaggcggagctttttgtcatcttatttagatgattatttagtcaaactcatagaagcagagagtagaaaaatggttgccatacattgtaagggcgagttgttgctcaatggatataaagtttcagttatgcaagatgaaaaagttctagaggtctgctgcataacattgtgcctatagttaacaataccgatttgtgcacttaaaaatgtgttaaccgaggtccggagatcaagaccatcctggctaacacggtgaaaccccatctctactaaaaatacaaaaaaagaaaaaattagccgggcatggtagcaggcacctgtagtcccagctactcgggaggctgaggcaggagaatggcgtgaacctgggagacggagcttgcagtgagccgagatcgcgcaccactgcactccagcctgagtgacagagcgagactccgtctcaaaaaaaaaaaaaaatgtgttaacagggtaaagttcatattaagtgttcttatctcaataagaaaagatgattatggccttttctttatagcccagatacccatgttcataacttctgtaatactagctgtctcaaatgactattaagggaaacctctctttctgttgtttgctccattgcctctttcttcaaatttttttcttccatgaacccctatgaatttgctttagattactgggggcaatattcttgccaccctgccatgtacatcctggattgcttgcccttttccaagacctcgcttttaagttaactgagcattgcttgtcccgaagtgagcatttggtaaaatattcttatgtgtttgagactcaataaatatggtggctctttaaataaagaaggtccttttggtgacagaatatattcagcaactttcttgtcagacatagaaacaatacaggagacataaaaaataaggtagaaataacacaggaacaagaatgatgacgtaggatggcaaaactagtaaatacagatcaagttacagatatgactgttaacatcttgttctatgcctgctcggtatccatttgttgaatgaacagaactgttggatcatcctacatttcagagcctgtctagtgtcctctcatctcctacctaatcctgcagactacagaaaaagccccaagcagcagttcaaaccatggaacttctgagtgtttggacatgaaaatctcctttaagaaatcactaggttgaagaaggcaatgctaatgggaccacttcttgaggaaattccacccagtaactcagcagtgacactcagctttggatctggaacatgagtagacctagaataagatctgtccatttttcccaatttacagcattaattttttcacttatgattcatgagtccaggctttcccctgcaagcctgttttgcatctaaatcaacttggccttcatataacacactctagtgttctaactgggtgttctgtatcttagtcaacaatgtttactgagcatttactatatgccaagctatggctatggtttttaagcatcgataataacgatgcttagcagagactctcaaactgccaccatagagcaggcctgtggccgattaatgatcttaacaaattgattatagtatatgagaactggatgttagaacttagataaggttttagcaaatgcccacattttacaaatgaggacacagaggagcaggaagagtttatcaccttttctggatcactgcagccaggttctggcccagcccaggcttgaagcccaaggcttctgccactcagaacagtgctcttttcaccacttcagcctgcctcccaggatgattctaggaagttctgcttacaaatatgggtagtatttctagtcattccatcagattttattctgaaaaacacaaatttaccatttcaatatgaatacaggtaaaattcagcgccaggcaagctgtacatgattgaaagacatctgtgttttgaaaagcacgggcttttactcacatccatagtaatatgatcctaaatccactgtccccaggagaaagcaagatagcttttctccctgtcatgtcattacctatgcccagagttctcctcttgttcctctcatgaagcaaatcaatatctcacctttcatcccctccatacgtggttctgagctacttctatttatggcattatttagatatttttataatataagcaggaagcaagagggacagaaaaaaataatcagtggccaggtgtggtggctcacacttgtaatcccagcactttgcgaggccgaggcaaacggatcacctgaggtcaggagtttgagaccagcttgcccaacatagtgaaaccccgtctctactaaaaatacaaaaaattagcagggtgtggtggcgcgtgcctgtagtcccatctactcaggaggctgaggcaggagaatcacttgaacccaggaggcagaggttgcagtaagccgagatcgtgccactgcactccagactgggtgacagagcgagactccgtctcaaaaataaataaataaataaataaaaataataataatcaataacttggttcttctctattactttcaggaattttttaagtttctgatttcttccatggccattaggattttccacttatgtggcttccaaattattctaagtcagggagattttatgttttgttatcactcactttcagcttcactttagaattgcaagatttagattcaaagtgtgtaattaactgatggccttaggtaaaccctaacttatctgtatctcaatttgcatggatgaaacattcataatataaaagtatacaccacaaatatacctactcaaccaaactattggctccttaatgacaaagattaagtctctatatctttcctaactttgtacctaataggttcaaaataaatattttttgaatgaacaaattagtgagtcaacaatcagtcacccggttggccagtacctatggtgttttaagtgcaatctaccagataattcaaccttcataataaatagatttatcttgagattatcattgctataatagtgtagtagcatacttcatataagtttattttgtgaaccttaagaagctcaaggacaaacatctgtgtagtattcctaacattttctaaattgcatattttattttcatagaggtgctctacgtctttagtattgcttctaattctctcatatcactattttggacccttgggtctggctgtcttggaaaggtgaaaagaaaggtatggggaagaggatgtgttttaacaaagataattttatctgttcaagggattcaggaagtaattatcttaacatctgaatgctaacatctgaatattgtaaatacgtattctgtatgtacatgggagaaaatatctatatctgataccttttctatcatcacataaaggaactgacttctctggtttaaaatattaaccaaaatttatatgacaaaatcagtatatatgagtatatattttctcaaacctctttcaaacaggcctttttgggagacaagacacttatcaaaatcaaggctcttgacattaaatattcttgtttgtctttttttaaaaaaaagtcttcatttttctttcttttaaaatgcaataaattatactacaacatgcagtttatggtgagttattagatactgaaaaattggctttccattattttaatgcagattctacattgctttttttttactacataaagccatttgttttaagctccatgctacaaagaccacagatgttcattgcctagaacagtgtctgatacatagtagttgcttgaagtttgttaagtgactaaattaaagaggatcttacatataaccatgtttaaaattacatattgttatttatagtttttcccacatgataagaattattgccattttctttaacctctgacctccttgaaccaactatttctctctttttgtgggagttttatccttttgtatttaatctgaatcttttgaaattctaaagatacaatcacttaaccctctcttccatccactttcttttcttaatttcaggcaacaatgtgaaaataatggtgcttatgtctttgtaataacagaactttctttgtcttttctttggcctcattttaatcttcaatgactcatatttaagaaatgaactgtgcagctgtggtggatctaagtccttggcaacaactcgatgggcaaacacgtggtctctcacaatggatgctccttagctttgaattatttactgtccagttttaacaatggaattatatcatcaaatagtgccttggactttttaagtttttagtgccttaagtttttaagtttgatgagacctttaagatccatttccggccgggcgtggtggctcacgcctgtaatcccagcactttgggaggccaaggcgggcagatcacgaggttgggagatggagaccatcctggctaacacggtgaaaccccgtctctactaaaaatacaaaaaattagctgggcgtggtggcgggcgcctgtagtcccagctactcgggaggctgaggcaggagaatggcatgaacctgggaggtggagcttgcagtgagccgagattgcgccactgcactccagcctgggcgacagagcgagactccatctcaaaaaaaaaaaaaaaaaaaaaaaagatccatttccttattttacagaccttgttccaacaattatctccaccttctgtcaaggtcgtaacatatatctagggtgaccaactttcctcgttttcctgagactgtccaattttcctgaaactattctggttttaacatcgaaagtctctcatcctgaaaaactcaatgctggacaaaccaagatggttggttaccctactgctagcttccgtctttcactctaggttcaaatcattcctatgctaaaaagaacttcttatccctttgtcttgttatcctctctgtcctcctgtcgtgtcttcctcttttccttctcagaaaaagaaaattgaacatttgattttcacttgaaatacctactccttcttccactcactcctcagctatgcctacttctgaggcttctgccctccactgaaattgctctcagcacatctagtgaacactctgcaatgctgatcttactttacttctgtgtttcattggactcacttggtcaccctcttcctctcaaaattctcactctctccttgaaatttctacactcctcatttcccctaatctctccacctatttgttccttttctatctctcaagagatcctgttcctctgtttgcccattaaactttgatatgtaggcactcaacgtatattagctgaatgagaaaataactcctaagtattttttttctcctcaaacctcagaatttattatttccttgtggaaggaatgttagctttccaagctgagcatatcacagtcccttactctgtcccccatgcacagaacaccccccccacacacacacacacacaccatcatgttgcatttttaatattactcttcaataattttatcctgaatgagcatgaggggttctgaatcagaggcagatttcatttaattaccttacagtaaatattgttgctgtgcccttcctttgcccaaagacttacccctagggcaacatgatgaacgctgatgaaacattttcctacttgagtggctgggtactccataagtgggagactaggaaaaatcattttttctgcttataaaggagaaggaggctgctatccatctctcattctgaaaggttctctgtggaaacataacaggcctgagtcctaattccagcttctgcagaaaccagctagccctgtgtgtctcatgttttacaatctggaaatgtctccaaggtatgggcttcatattttttgaaatgtaaatacctagaaagatacccactccagtctttctaacaacatagagttcagcttaggaacctaccctgagctataaccgtttgaccctcttggatcagagaaatgaactagacaaattgctacagatctaatctccatggtgtgggaagtttctcaggaggctagagctttctgtaggtgaactgagacatccaggaaagtttatttcctcatacttagttgaattgcacccagcgtttgctcatctactcaacctagacactaagtgtcattcttgtttctttttctctcttctctccagcatctattcagtcaccaaattttcacacttcagatttttagacatttccctatcctatccctgtcatttttcctggtaccattgccctgagtcaaatcctcataatcttgcactgaattcttacaattgcctcattatctctctgattccatttctgttcttctcaaatacatactctgtatttatatcaggaagatctatttgaagcacacatattcctgtgccactcccttggttaaaaccgttcaaaggttcctgattaccttcaaggcaacacctaagcctcttagtggaccatatgtgatcatagagaggcagagcttcaaattctggtttaaaaatctaatgtatttccagatagcaatagtgtctttttcatctttggacatgccctctccttgttctttatgctctagaaacactggcctgcttgagattccgatacataccatactgcactatgtcctatgactctgcacttgcattttcctcttcttggaatgttctctagcatactcttccttgaataagtcatgttcatgcttttgaattctatgtgattactagcttctcctggaagcttttcccgattttcttccccatattgcgcaagtctatagcactgtctacattgtattgaaattatttacgtgtctgactcttctattatatgttaaatattcctaaatagaaagggctgttttgcattcaactttgtatttccagtttcaggtacaaccactgacacatggtagttcaatagagggagccattattatttttataattagtaatgtcagtattaattgcctcccttcaggtccaaacagagaaactaggcaaaatgataatttacttgaatttgggaaacttaattgtatgaaaaaaaacacaagaatacaacaactgaacacacacacacacacacacacacacacacacacacacacacaaacatggagatttcaagtgaaatatcaggagaatcagctttatatgtaagcagagtaaataactcacgtatctagcatgattttagggtacagaaatatcccattattcagaaagtacttccctatctgtaggctgaatcctaatattctacttacagaactccagtattttggttcaaacgccttccctttctctattgaattgtaaatagctgtggatgatgaatcattttgcaaagtatcagactcaggattcttttgaatggtgaacaccgctaagattttattaataaatgtgtcatacaatacagctctggaacacttctgtaacataatggcatatctgaaattcaaggaagaatactgctaatttgtttttccccagtgaaagaacagggcttaaattcagcaggcaacattgctaaaagacagagttgaaaaaagttacaaaaattaagccctagatcagggcaaatattactgttattgttaaacagttatattagcatttatgtagcatgcacttaatacttttattaataccctcacttctgagatcaaagaatctgggtcaataactctcttcaatggtgtcagagtatccgttaggttattctaggctcacggtatacctcacgatccttttagcactcgattatgtgtgaacttactgttttcactctgcttctagtgttaattttctcccttctttggatctagaaactttttgaaggcagaaactattcattttgtttttctcttgatcccctggataaaggaagattacagattaaagattaattctagatctgttcatttatagaaactagtgtccgcaattcctacatccataatagctcaaaacatttctactattctcaaagaggtcacaatggatgatgtaatgactatttttcaaaagtattgagacttttctcttagcttacctattttataccttgtcagacattttgacagaattaactggtgattgtcagttggattcattgtatactttaatatagcctaaggtcctgcaaatggcccttaaggcttcccattatgttctggatatccactatttggggtatgtttaagtcctcattagccatgctagagttttgcaatatataccttgaaactttagctgtagatttgaagtatggctgtcaggttacataaacaaagcactcttatctcaatgagagggcattaactatccagaatgctccccccatctccccagaatagctttacaaacacagcgctttcctcattaacagatagacccatatagcctttaaaaaaaatcattttataaccatcagtgtataaataaaagagatagaaattgacctgggagtttcataaacaagttctgagcacccaggattaattttgagaagaatgccacaagccaaataagcacttcttttcatctcatttcacaggccttcaagagggaattgaaaactaaagaacctgtaatcatgagtactcttgagactgtacgaatatttctgacagagcagcctttggaaggactagagaaactctaccaggagcccagaggtaattgaatgtggaactataataacatattgatagaaggatcagtggtgacggagcagcccatccattcttgctgccagggtctggatagctctcatattttcttggttaaatagaatcaattcaaattaaacatagatgctgaaaaaaaaataaggactcataaactaccatgcataaatcagtttgtgcattcataaataaacatcaaaagagattagcaatcagttattggaacatttagaaaataataaacaaagggagttatctgtgaggaggaattctattgttgcaaagactacaagttaattttccatttaagagcctgcctgaagtaaattagagcttgtggtatgcatcctaacgtttttctcctcaatagcttaagtgaatcttaaattgtcggattgatataaggtagaaactcaggaagatatactttagatgttctgggctgtatcaaaatttatgccaaagtataaaaaagccgttaatcagtaggttaccctcttgttcaactgtactctttctttcttccagtatgacctttttgacaatgtttaaaaaaaaagaatgtggcctaaaaccttgtcatattgccaatttagagctgcctcctgaggagagagcccagaatgtcactcggcttctacgaaagcaggctgaggaggtcaatactgagtgggaaaaattgaacctgcactccgctgactggcagagaaaaatagatgagacccttgaaagactccgggaacttcaagaggccacggatgagctggacctcaagctgcgccaagctgaggtgatcaagggatcctggcagcccgtgggcgatctcctcattgactctctccaagatcacctcgagaaagtcaaggtaccgtctacttctttgcttcagggccctttgagagactcaaaagagcttctaatctgaacttgagtgcagtgttatcttcccacaaagttaaagctagagaaatcagtccgtctttcacaaattcagtcttcattcacatggtattttctccaagagaagacagtgatctaattatttgtctgtcttcagttatatgaaatgaaatattaaaacagttacagggcaagaaatcactttgactttgatattaagtgattgtactaaagtctgatgtgtgtgtgtgtgtgtgtgtgtgtgtgtgtgtgtattggtgtattgcttgtgttacttagtatcagaatacagaaaaataaaacacttaatcaaaagccaggagtctaggtgttggcccttttgctaaccaaattacatgacttgggtaagttatggtttggtgaaataaggctgttaatgtgttgcccttcccttggaaggcaacatttgtaatacagtttcaagtttcattggcccactgcagaaatgagggaaaatcattatatatttggaagaccactgtctataagaccaaagttaaattcccttgtggcacaaagatggcaaatatattctgtagaaaaaaatacatatttaggagtatcattttgaaatcagcaactactcatctattgtcaaaatcacaaaaatcctcctagattaaaattcaaaagaagttaaattccctcatgcactcagcatgtttgccagcatctcagcatcctcattctagaagttgtcctcttccttggctttcatggaactgttccatccatgttcttcttcctatatttttctagattcttctcctagccacccctcaaatactgttgtgcccaagtttctaaccttagcctaattctcttttgattgtttaaaccctccctgtttgagatggcctggatggtgatgtatctacatctctagtccgcatctctcttctgatctctgaatccatgtggcattacgatcacaaatgcaactattctgaaaccaagttcatttgttctcctgttttccatttccctacttctgtcccctcttatctgaccttttttttcctgtttcctatttcagttaatgaatcatcatccaacaaattttccaggctagaaactttaggttcatccttaaacccttctgcattttcactgatggcacatgatggctcatgttacctcagaatagctcttttgtgttttctctcctcttttaaccaatgtcctttttaatccccagcatcttttacttagatgataacagtatacatctttaaatcccattcacccctctgtgtgcctggcatatctcagatactgcattttaaacatttggtgaattaatggatggatgaatggtttctttgctgatgttcctgcattacccagcttcttccaattccaatccaaactccttgcgggagaatacttgcctagagaatgaaatccaatgaataaggagattacgtggcccttttcttcctagccttgacttaccttctcagccatagctcctattctccagaccatttaatacactctgcccatatgatatatatatatatgtgatggcatatttgggaaaaaggggtgatatgggcagagtgtattgaatgtgtgtgtctgtaaagtatgtgtgtgtgtgtgtgtatatatatatatatatatatatacacacacacacatacatagttagatatatacatagtatatatacatatatacatagatatacacatatatatacacatagatatagatatagatatatctgcctttgcaaatgctgttctctctgtctggatccccctacgttgtctacttggcgaattctccttcagccctcaaggaccagccaaaatgttacctatctttgttgtctttcctgagtgtctacaacccccaactcccaccaagcagaagaaactgcttacagttggtactctcatagatcaccaagcatgctaaattgtcacacttaaatttcacatatattgtagcaacttgcttatgcatttttttttctcccagagaaagtgaagttgctaagagcaaggatcatgctgtacatctttgggctgctagcccagggccagcaacatatgaggaatctcattaggtaccttcatttattcactcaacaactgtttatgagtcattatataatgtgctggacaggtagttataaaagaaacagacttgatcattgccttcatgaagcctatggtctaatgttgaattgcatagctcttcattaaaatagtaggtaaaatttttaaaaagaaaagattaaaaatttgactctaatacttgtaaaatcccttctaccccaatgttttatgaccccatgtctaacatttaaagtaagggttaaccttgctgtgtactggaaaactaagggttttgaaatgtattacctagtattttaaaagcattaaatatgttgattttattcaaaaatatagggactaattttttgacagacttctccaaaaatgagaaataagttaggaaaatgtcccagtggaactaaattagttaatatgtcaattaaattgctcaatagataggctgtagagcagacataagggattcatttttagccatacttgtcacacaggtgcatttgtaagatactgagtatggatggagaagagaatgtgtacagcataatttaataattaaaaataactaaaagcataacagttcaagtatcagctggccttcacccaaccctatttgcggtattccttttagtttccctgtcttatctgttcttggtcttaagacaaacttcattttccataccctgattggtaaaactctcattctgatcccaatgatagcaaaacatataaacattaaacatacctttcgaaaaattatatttataacccagcacatctatctttctcagacatatatacacttaagttatggtacttatctgaatttttatgtactggtaatagtagatgtgattgggcttttgaatctgtgttgtattttatgcgtgtttcaaactatgaattacatgaattcatatatatttatctcccttcggtagctcttctttaattttgcagtggaaataaatcatttttctccactgcatcttattgacactgggtttgaaactctgaagctttgggggtagtagtttacaaagaatgagttttattaactaaaatttatttcagaaaaaaagtagaagtgtacttgaaaccactcttcccatttttccactcagcaatttaagccctcagaggattcatgctgtagggaacttttctaataaaccatggtttctctttttttattttattttattttattttattttattttattttattttttttttgcgacagtctcgctctgtcacccaggctggagtgcagtggtgctatctcggctcactgcaacctccacctcctgggctcaagcagttctccgcctcagcctcccaaatagctgggactacaggcgcccaccaccatgcccagctatttttttttttttgtattttttagtagagatggggtttcaccatgttggccaggctagtctcgaacttctgacctcaggtgatccactcaccttggcctcccaaagtggattacagcactgataactaggcagctagctagaagaacattttatatatccatatcagttcattttccttacccctagacactctatcatagtaccccccctccattctgatcttatgtgttaaataacttgttattcaagaaactaagtaatatgtgtttctgtgagatttagcattctgtaattgtattagcaaatgtggcttttggatttaaagaatgggtgaaacaacaatgactaagtccctggcctttatggaaatggcattattgctagctgatcatctgcgggtggtgaacatggtaaattaataaatggaaacacaatattaatattgactatattgctcactaagagaatctcagccttccaaacatagcttccataggaaaaaacagtagaatcaaatttaagttttaaatgcttctttacttttaaaattcatgatttatactgcttatcaaatattttaagggcaagatcatgacttttcactttactgaaaatagcaccagtgcttatttgactagacaaatattctaccttccttgtaatggggaataggaataactttttgaattactaggtgttccacatagatctgtaagtggaatatataaaggctttaataaagtagaataacttttaaacctgtagtctggatacaagatttttgttcttcaggacaatcccaaggtgaaaaggtttgtggattgttgttttctttttttttttttttttgagacagagtctcactctgtcaccaggctggagtgcagtggtgagatctcggctcgctgaacctcctgggttcaagcaattctcctgcctcagcctcctgagtagctgggactacaggcgcgcaccaccacgcccagctgatttttgtaattttagtagagacggggtttcaccatgttggccaggatggtcttgatctcttgatctcgtgatccgcccaccttggcctcccaaagtgctgggattacaggcgtgagccaccgctcccggccagattgctgttttttaatgttttgtttttgttttaataaaccatggtttctctttttttaatttttttttttttgagacagtctcactctgtcacccaggctggagtgcagtggtgctgtctcggctcactgcaacctccgcctcctgggttcaagcaattctctgcctcagcctcctgagtagctgggattacagacatgtgccaccacgcctggctaattttttttttttttttggattttttagtagagatggggtttcaccacgttggccaggctggtctcgaacttctgacctcaggtgatccgttcaccttggcctcccaaagtgctgggattacaggcgtgagccactgcgcccagactataaaccatagtttctctgtaccaaaagtggtatgtccttcttgagccaggaatatttcactgttcttagtttacctgttgactctgaacacagtttttcatacactgtaaataactctcccaggctgccatcttggaatatgcaaatctgtcgcatctatgtagttatgcatatcgcatttttgtcaaacttttaacttgcatttcttactgtgaaaagtcagggcagggattctatgagttttttctttaaagttcctacaatgaaatgttttgattaaaccttttttggcattcaaattgagattgatttaatgatgtgtgtagtaggctagaaattatgatgaagtgacgatgccatccttatttatcttcagcattcacatctaaagttttaagaagaaaactggcaaatccacctttttaggcttaccatcctcagtccctgtggctttgggtttttttgagaaatttgtcaaagaaacgctatgttagaatttgacattgaggaagccaagcatatttcctctgaatagataatgtgaaatgtgatataatgtattagaatttcatcttcactttggcaagcaagatacttgcaaccatgttcatgcaactatcttcccttattgcttttctcttcttaaccttggttctaaagttttcttcttattgtattaattttgttatgcttcccatttatatgagtcaagtcaaccttacttgatttcttatatatgagttatgtaaggaaaacttatcttttcttatagaattaggggatgaatgagcagatagaaccaacatgaacagggcgatcctaaaaatcattcaaaacatgtaagctctcccaactctgaataaacttgtgatatcttcataatgaataaggtatactgcctatagtaggaagaggaaaatttattaatgttttgtgcattgttaaagaactacaaatgaattgccgtgtggaggctttcattgttgttgttgtaaaaatgctatgtgtattaagtaagcctttgatggagaagaaaaaacaaagaaaaaatatttaatccttcataaatctgggttaaatatgaagctaattcctgttatttggagtaaccagggttttatctagtttacaaagcatgcaattgcaatgtttaaaagcatatgatttggcctttaatatctgaaaatatgtctatcaaaggccatattatagcgagtgtcactccatactttataagtacggtatatttttaatagaatgtttatgtactggtgataagagatgttactgggtttctaaaccagtactgtattaaggattttatgctattgtaagattatggattatgtgaattcatatatattgatttactttcagtagcttttcaatagaatatctagggtttaatacagcttagaaactaaagcaggaattattcatctttaaaatcctgaccaaagaagtggctggcaagatggctgaataggaacagctcaggtgcgcagcccctagtgagatcaacacagaaggtgggtgatttctgcatttccaactgcagtacccggctcatctcactgggactggttagacagtgggtgcagcccacagagggcgcagaagcacggtgggatgtcgcctcaccccggaagcacaaggggtcagggaattccctcccctagccaacagaagccgtgagggactgtgccctgaggaacggagcattccagcccagacactatgcttttcccacagcctccgcaacatgcagaccaggagattccctcgggtgcctacgccaccagggccctgggtttcaagcacaaaattgggcagctgtttgggcagacaccgagctagctgcaggcgtttttttcatatcccagcgtcacctggaacaccagcgagatagaaccattcactcccctggaaaggggactgaagtcagggagccaagtggtctagctcagtggatcccacccccaacggagcccagccagctaagatccactggcttgaaattctcgctgccagcacagcagtctgaagtggacctgggatactcaagcttagtgtggggaggggcacctgccattactgaagcttgagtaggcagttttcccctcacagtgtaaacaaagccgtcaagaagttctaactgggcggagctcaccgcagctcggcaaagccactgtagccagattgcctctctagattccttctctctgggcagggcatctctgaaagaaaggcagcagccccagtcaggggcttatagataaaactcccatctccctgggacagagcaccacggggaaggggcagctgtgggtgcagcatcagcagacttaaacgttcctgcctgctggctctgaagagagcagcagatctcccagcacagcactcgagctctgctaagggacagactgccttctcaagtggggtcctgacccccgtgcctcctgactgggagacacctcccagcaggggttgacagacaccctcatacaggagagctctggctggcatctggcaggtgcccctctgggatgaagcttccagaggaaggaacagacagcaatctttgctgttctgcagcttctgctggtgatactcaggcaaacagggtctggagtggacctccagcaaattccagcagacctgcagcagagggttcctgactgctagcatcaacatcaacaaaaaggacgtccacacaaaaaccccatctgaaggtcaccaacatcaaagaccaaaggtagataaatccacgaagatgaggaaaaaccagcacaaaaagcctgaaaattccaaaaaccggaacgcctcttctcctccaaatgatcacaactcctctccagcaagggaacaaaactggatggagaatgagtttgacgaattgacggaagtaggcttcagaaggtgggtaataacaaactcttacgagctaaaggagcgtgttctaacccaatgcaaggaagctaagaaccttaaaaaaaaggttagaggaattgctaactagaataaccagtttagagaggaacataaatgacctgaaggagctgagaaacacagcacgagaactttgtgaagcatacacaagtatcaatagccaaatcgaccaagcaaaagaaaggatatcagagactgaagatcaacttaatgaaataaagcatgaagagaagattactgaaaaaagaatgaaaaggaacaaacaaagccttcaagaaatatgggacgatgtgaaaagaccaaacctacatttgattggtgtacctgaaagtgatggggagaatggaaccaagttggaaaacactcttcaggttattatccaggagaacttccccaacctagcaagacaggccaacattcaaattcaggaaatatggagaacaccacaaagatactccttgagaagagcaacccaagacacataataatcggattcaccaaggttgaaatgaaggaaaaaatgttaagggcagccagagagaaaggtcaggctaccccaaaggaaagcccatcagactaacagcggatcatttggcagaaaccctacaagccagaagagagtgggggccaatattcaacattcttaaagaaaagaattttcaacccagaatttcatatccagccaaactaagcttcataagcaaagtagaaataaaatcctttacagacaagcaaatgctgagagattttgtcaccaccaggcctgccttacaagagcttctaatgaaggaagcactaaatatggaaaggaaaaactggtaccagccatggtaaaaacataacaaattgtaaagaccatcacactatgaagaaactgcatcaactaacgggcaaagtaaccagctagcatcataatgacaggatcaaattcacacataacaatattaaccttaaatgtaaacaggctaaatgccccaattaaaagacacagactggcaaattggataaagactcaagacccatcagtgtgctgtattcagaagacccacctcatgtgcagagacacacataggctcaaaataaagggatcgatgaatatttaccaagcagcaaatggaaagaaaaaaaaagcaggggttgcaatcctagtctcagacaaaacagactttaaaccaataaagatcaaaaaggacaaaaaaaatggtattacataatggtaaagtgatcaatgcaacaagaagagctaactatcctaaatatatatgcacccaatataggagcacccggattcataaagtaagttcttagagacctacaaagagacatagatgcccatacaataatagtgggagattttaacaccccactgtcaatattagacggatcaacgaaacagaaaattaacaaggatattcaggacttaaactcagctctggaccaagtggacttaatagacatctacagaactccccaccccaaatcaacagaatatacattattctcagcaccacatcacacttattataaaattgaccacataattggaagtaaaacactcctcagcaaatgcaaaaaaacagaaatcataagagtctctcagaccacagtacaatcaaattagaactcaggattaagaaactcactcaaaaccacacaactacatggaaactgagcaacctgctcctgaatgactgctggataaataaggaaattaaggcagaaatgaataagttctttcaaaccaatgagaataaatacacaacggaccagaatctctgggacacagctaaagcagtatttagagggaaatttacagcattaaaatccccacaggagaaagcaggaaatatctaaaattgacaccttaacatcacaattaaaagaagtagagaagcaagagcaaacaaattccaaagctagcagaagagaagaaataactacgatcagagcagaactgaaggagatagagacatgagaaatccttcaaaaaatcaatgaagccaggggctggttttttgaaaagattaacaaaatagatagactgctagccagactaataaagaagaaaagagagaagaatcagacagacacaagaaaaaatgataaaggggatattagctctcatcccacagaaatacaaactaccatcagagaatactataaacacctctacgcaaataaactagaaaatctagaagaaattgattaatttctggacacatacaccctcccaagactaaaccaggaagaaatcgaatccctgaatagaccaataacgagttctgaaattgaggcagtaattaatagcctaccaaccaaaaaaagcccaggaacagatggattcacagctgaattctaccagaggtacaaagaggagctggtaccattccttctgaaactattctaaacaataggaaaagagggactcctccctaactctttttatgaggccagcatcatcctgataccaaaacctggcagagacacaacagacaaagaaaatttcaggccaatatccctgatgaacatcaatgcgaaaatcctcaataaaatactggcaaaccgaatccagcagcacatgaaaaagcttatccagcatgatcaagttggcttcatccctgggatgccaggctggttcaacatacagaaatcaataaacataatccatcacttaaacagaaccaatgacaaaaaccacatgattatctcaatagaagcggaaaaggccttcaataaaattcaacaccccttcatgctaaaaactctcaataaattaggtactgatggaacgtatctcaaaataataagagctacttatgacaaacccacagccattatcatactgaatgggcaaaagctggaagcactccctttaaaaaccggcacaagacaaggatgccctctcccaccactcgtattcaacataatattggaagttttggccaggacaatcaggcaagggaaagaaataaagggtattcaaataggaagagaggaagtcagattgtctctgtttgcagctgacatgattgtatatttagaaaaccccatcgtctcaacccaaaatcttcttaagctgataagcaacttcagcaaagtctcaggatacaaaatcaatgtggaaaaatagtaagcattcctatacgccaataatagacaaagagagtgccaaatcatgagtgaattcccattcacaattgcttcaaagagaataaaatacctaggaatacaacttagaagggatgtgaaagacctcttcaaggagaactacaaaccactgctcaaggaaatgagagaggacaccacaaacaaatggaagaacattccatgctcatggataggaagaatcaatatcgtgaaaatggccatactgtccaaagtaatttatagattcaatgcagtctccatcaagctaccattgactttcttcacataattagaaaaactactttaaatttcatatggaaccaaaaaagagcccacatagccaagtcaatcctaagcaaaaagaacaaagctggaggcatcatgctacctgacttcaaactatactacaaggcttcagtaaccaaaacagtatggtattggtaccaaaacagatatatagaccaatggaacagaggcctcagaaataatgccacacatctacaaccatctgatctttgacaaacctgacaaaaacaagcaatggagaaaggattccctattcagtaaatggtgctgggtaaaccggctagccatctacagaaaactgaaactggaccccttccttacaccttatacaaaaattaactcaagacttaaacataaaacctaaaaccataaaaaccctagaagaaaacctaggcaataccattcaggatataggcatgggcaaagacttcacgactaaaacaccaaaagcaatggcaacaaaagccaaaattgacaaatggaatctaattaaactaaagagcttctgcacagcaaaagaaactatcatcagagtgaacaagcaacctacagaatgggagaaaatgtttgccatctattcatctgacaaagggctgatatccagaatctacaaggaacttaaacaaatttacaagaaaaaacctaatcaaaaattgggcaaaggatatgaacagacacttctcaaagtaagacatttatgcggccaacaaacatgaaaaaaagctcatcatcactggtgattagagaaatgcaaatcaaaacacaccagttacaatggcgatcattaaaaagtcaggaaacatcaggtgctggggaagatgtggagaaataggtgtgcttttacactgttggtgggagtgtaaattagttcaaccattgtggaagacagtgtggcaattcctcaaggatctagaaccagaagtaccatttgatccagcaatcccattactggttatatacccaaaggattataaatcattctactataaagacacatgcacatgtatgtttgttgcagcactgttcacaatagcaaagacttggaaccaacccaaatgctcatcaatgatagactggataaagaaaacgtggcacagatacaccatggaatactatgcagccataagaaaggatgagttcatgtccttggcagggacatggatgaagctggaagccatcaatctcagcaaactaacacaggaacagaaaaccaggcaccgcatgttctcactcgtaagtgggagttgaacaacgagagcccatggacacagggacgggaacatcacacaccggggcctgtcgaggggtgggaggttaggggagggatagcagtaagagaaatacctaatgtagatgacaggttgatgggtgcagcaaaccaccatggcatgtgtatacctatgtaacaaacctgcacgttctgcacatgtatcccagaacttaaagtataataataataaaaaaaaaatcctgaccaaattatttattcaatgtgaaattaattgtaagttagtgttgccaggagagcttattacttagttaccatgtattccctctcatctcctgctttgtttataaagctaaaagcaaattacttaggacagcaatgtcaaatcactttctttccccaaagcatctgattttagatagcgctgtgtgtgttttaaaagcccctacctcgacttaggcaaacagaaccttcgtttaccatgctattcccatcccgcctttgaaacttctgaaaaggcagagcggagtaattgtttcagacatctgcttagcatactttgaagtgcatataagttctttttcagtttcatttgaaccccagctgtcttcaccgaagtctataatcaatctgaattaagttgtcctacttctcctaataagtctcttattaagttctgcatcagcctcttagggagacttaaaagctaattcatgtagaattgccattttctactaattcacttgtcagctctccaaattccaacaaaaacaattgcaaagactattaatttggctcttcataaacaacttatgtaagtgtagtatacattggaaccaaacaaacgatttaaaacagtgggtgggaggaaatgagttgatggcattcaaaacgcttccttttttgactgttatgaaatgccttccacatcgaaagcataaagccatttatttaataagggaaacatccttctgcttttactttcatagatgagataatgactgaatgaactttgcttaaagacaggaaaaggctttagaacagttggaaaaggaacatgttctttttgtcattgaacttattttaatttggacttctttgtgttattttgatggactgtgataaaagaaggagctagaattggttattattgttattggattaaatcagagttgtacagctactcttctggtcatgggatatttaggagaacacgggtaatcaaaatgttcagctaatgagttcatctgattctactcaagaagtgtttaatcagataataaaaatttctccaaataataccatccttcctactatttgaaaacaaccatatcaacatctgatcctataatatgccaatcctgtttgctaggattttctgaaagctttgtttgtggtgggtaataactagaaatactattcctcaagagtctcgggtaataaaagattattcaaaaaacttaagtaatatactctcagtattagaggatatacaaatgcactcattcattaattcatgatatgattgaaacctatacccagagaagtctgatctcattatagagtgtgaacatttaatttatttcaaaaacaaaaattatattgagagttgtatagatggcatcttagttttcctgggaatattattatttagcaccaagctgagggagcaagaatttgtattagcttgtgtatacatgtgcatgtaccacattaactagaaacagtgctaaaatgtgagttatttatttaactgaaattccatatttcctaagaaaatggaatcacacagccaatatatatttttaattattttttgacatctaccaaagttgtgacaagaataaagttcacaattctgttactctcctaccgttcagtaaaacaggaaatgctttaagatcaaataacccaaggagttcgcttcttcctgtcatgcttgacaattacaattttcaaaatttaacagttagcattgacaccagtattatgccttacacaacctgaaattaactaagttaagtaatggcattgaataatttttcttggtaaatcagttttctgggtattatgggaacagttgtgtctgtgatactaatgtctctctcattttaatggggcctaagaaagaactttttcataataagattttttcatgttaaaataatatttttagttatagtttacacttactgcaggtttttctatttaaaagcatcttccgagagcagtgattcttaaacttatttacttcagttatcttaacagcatagaagacatagcctgacatctcccgcttccacttacctatctcctttttccatgagcatgaaatttctttgatgttcttgttttattttttaaatctcacatcaattttatggtattttccataatggattcatcatgttttaatatgaagatgctttttcttcaaattctgaagtaaggaatctttcagcacattcacctatggacatgaaagcgtaagttgagaatcacagtataaaggattgcccagtttttgcaggctttatctttttccatcaacttctgtcttttatgtacacagacaaaaagagcagacccttgctatttcaaatttatcttttgcaggttcatctgattattgtgatccaaagttccatgactagcagctcttaattttgaacatgtattatttcaagcttttgtgcatagtcacttaactaatgagttaaatggcattttaagtcaggttccatgaacgcagaccctgagaacaggggtctaggtgcctgtgatttatagagggtctgctctcaggagaagcctgtattggagttagggaaacaatacaggagaagaaagagcccagcaagtatgccatttcaggtgaaacctcacattgtgtctgatccagagagagagcaagccctcgagcagaaacctcgctgtggagttgtactctttattttattttatttttttgagatggagtttcgctcttgttgcccaggctggagtgcaatctcagctcactgcaacctccgcctcccaggttcaagtgattctcctgcctcagcctcctgagtagctgggattacaggcatgcaccgccacgcctggctaatttttgtgtttttagtagagatggggtttcaccatgttagtcaggctggtcttgaactcctgacctcaggtgatctgcccacctcagcctcccaaagtgctgggattacaggcgtaagccacaacaccgagccggagttgtgcctttataccagtcattgtctgtgtcactgaagtgctggcaaatatttgtcgactagctctgaggtgggatgaatcctggtgtgtatcaaaaccagttttcgtggtgtaaatactccctctaccactgatctccagctaccgacataatgccactgagtatggaattgggaggagatgcacacaattggctcttgggctctgctgcagcacaccactggctgtggtccactcctgggatatgggttacttcctgggctagggggctcccataagcagaggtcacatgtggagaaggcaggtagctataagacattaatagtcaaccatcacagcagctgaaggatggatgcccaggttaggtaaagtgtcccctgcaactaataagtaaacctagtaatccactcactcttcatattcaacttggctttttttaatgctgttttgtttttgcatgtacagtaattctttataaataatgagaattttgtttctttatggaaaatccacctaccctccaccctaccatgaatagcttgatagctgttcatcagaattagtgatggaagagaagagttaatgaatgaaaaagtctaagaaagtgatcactattagtaagaaaatggcctcataagtgagtttggctttatagttatggaatctgtaaatgtctaggcattcagacatgtccagacatcattgagaatgtcaagaattttcagtggcaatggttctcacctcagcatacatcagaatcacctggagggcttgtagaaactcaggttggtgaaccccttccccagagttcctgattcaaaatgtctggggcaaggctaagaagtcccaacttgttcccaggtgttcatgatgctgctggttcagagatacattctgagaaccaatattccatagtaaagctactgtgtatgtacctgaagacatattttgtgtagtgttagcgtttcttcaattacaagtaataaatatatcatttattatttcttttatatttatcaatatccagaagatttagtttaaaaatgaatgcaggcacacagcctcttgttggattgattaatagtttagatatgggagcatcatagggagcattgtttcgcttaggaaccttgaaatgaataaatggcttcttttctaaatctcacttgtggaagactttgacggtggtttatttcattttttcctgttggtattttaatgacactggtacaattttggggttgcttcagatgaccaacagcataacttgccttcccagtattaatttttaacgttaaaaatatttagtcatggccggccgtggtggctcacgcctgtaatcccagcactttgggaggccgaggtgggtgggttgcatgagctcaggagtttaagaccagcctggacaacatagtgaaacctcgtttggacaaaaaatacaaaaattaaccaggtgtggtggcatgtgtctgtagtcccagctacccgaaaggctggggcaggaggactgtttgagcacaggaggttgaggctgcagtgtgccctgttcactccactgtactccaggctgagtgacaaagcaagaccttgtctcaaactatatatatatttagtcacataacttttcactttgtgtaaatattttttgcatttaccaataaaaacaattacatttaaaaattctccttacacttttctaccaaacatactgatgataaaatagtactttatagagtttctgaatctaggatattaaaaatagttgggatcagtcaacactttttaagtaaaatctacttgctagatatgaatagctaacagcttctccaggagtgcctacattttataacttactttgtccaccccttgaggctctgtgttcagggggagggtatatttttgtgtatagaaatagagatgaggtgaaatagagatgaaatagagatgatgtgggatcaactgggagaaagtagaaaagagtcttagctgaagtggttgaggaaggaggatttttcccaaaatggtgcaaaaaacaatgtattaaatatctgtgaaaaagttcatggttgtggtatagggtgagtggtatatgaaaagagaattatgggataaactaatggaaacagatgtcttaaaatttgcttttaactttaaacaagagacatgaaacttaaacttttcccttatcctagaatctgggagaggagaaggatgagaaaaaatgaaattttacattagaagcaatttgattaatgttcaatggaaaatggaaatagctatggtcaaacccactcaaatcaagtgtacattaaataattgagttaactgaattaggcagagtaagggcacattgattttcagtgttgttgaaaattggtccacatatcattgttatgctttttgtttgtaaacctcaatatttattaagtttccacagtgtgctcagccctgaaacgccaaattctcttaaccagaatgaggctggaggatctaacactaagacagatttctattttcttttaaggaattgatttttatggtaattttttttcttcataaagttaagaacctgccagtcctgtttcgaaacacacttatttttagaagtttggttttccgggattatgcatcattatagactcaaatgactcatttagaacttttccctatcaaatattcacattctatcatcatgatcttaacacggcataagcaagttagtgaacagagtgaagtcaatttattggcaatatatgccgaagtacaggaattaagtagaaacaaaagtgaatgagagtctttggcaatacattgatgtgttttttttagaaccaatgataaactactgctgagtttcctttcatttacttttttcctactcttaaaacattgtaacccattttgagatctatccattgttgtgaacctaaagcctattaggtcttattaaataatacccatttaactgacctgtgatttaagtttcttatctgcccccaagcaagcagactgtatgcaacggcattttacctgcttcaccttctgcttgccagttggtttttggtcttcacatgtttctagcagggatggggctaaagcaagggagagaatggtccattgttttagactttcacaaacccaatatactagaatctccacaaaggttatccaatatcagggtgacttttgtgcatccaataaagcataaggttaaaagaaatacaggctaaacaaatgagcataaattactccgttggcttatgctgtgaataaaatattacctttggaaccatctcaattttttttttgtataaaggttgaaggaagacatttgcaaagtcgtttctcctataaaactgcctagggtttggggttgattgttgtatgcaagaggggtcttggtgaaatctgacccactttgaatctaaaattactgaattattagtgaaaagattattttaaaaagagttttgaactctttttcctactgaaattgtattctcctttagataatcaatgcagcatcacccccacagatttttgagggcactaaatcatactcctattttgaaaaagaaaaaagtctattactattaaatatatctgttagttgaatatcaatcactttttctaaagggtagatttggccaatgagtgatttttttttttttttttttttggaaatcacatctgagaacgttgtttagacagcttgacacttagactcatttgtgtaagtagtaatttattcatcatttgcatgtacttaactggacattatcatgatagcagttgtcataacagactattacaggatatgaatttagatattaccttaagatgtgatcataaaaatcagaataatatcttgaaaatatcaattttatggtgagaaaaatgacaaactgaataaactcttgactcaagaagctagacttttcacaacctcatgtattcacagaagtaaaaataacaactaataatgtgtccagagggcccacattgctcagaaatgaatacataagactttcttttcagcctcagaatatgatgaaaagaagatgaaccattatgatgttgcatagattttaatgaagaaaattcgttttctgttcctttcgtttgactttaagtagttgaacatcctgcttttttattttgtttgcaagaaataagaccattttagaaaggctaaaaacattaattacatttaggaactacaataatctgaaagtaaaattggatattaaaggacgtttttgcaatcctttttagccctcttctgtgtattatttttatcactgctcttaaaaatttgtattaatctttggttcatttctgccttagtatttctaagttaataatatattgaatgaaaaatcaaatcagtaaaaatccattttgtttcagtagtgagtgccttccccctagaaccaaaactaaataaatgtgctccatataaagcaaaccaggtacagcatattgcacgggtaactcacaattctagattcctctattaatcattattcagacatgcagaggtagcttaatttgctttaataagtgaaaacagaatctctttgagactgctatctgcaatattatactttgtcctgcattttcttggtcaaaaattgtattttatagccatgatatattttggcttggaatttgcttctttataagcctagttattaatagtcatcatttaaatgaaatgatatccattagccttaagctgcatgattacagagacttggtctatcttacgctgtatttccagtgcctagaacattccctggcatataataggtacccaataatagtttttggaataaatgaataaacaaatttgtgcaaaagcatagggcaaaatgctatcttttagatagcgtgacccttaaaaattattttgcaaataatttgctccatttgccaccagcttatttctggccattgttacttcttgtctctgcatacaaacactctgtgtctcttctcctttccacaatgaccacaagttatactgatctacttgagattttccaggtgactatttcatgtccagaggaacatgcctcttctagtgttcccctctgtgaatgatttcagtcaccttatctactcaggaggtctctcttcccctccatcagcatctttctctgcaccttccaaacccctatgactcaacttctcataatatggattgcattttttttaatgacccattaaattgtgtacctctgctaatgattgtgagtgtgttgagacttccatttttccagtggatgataggtatataatatatatatatatacacacacacacacacacacacacacacacacacacacacatatatgtgggcacagtatctagtggatataaagtaagtgttttcaagtgagtagtaattaaatctaagagttgccgagaaaatgccattcccgttttgtggacatcttcattctacattgtaaaggccacctcattcaagacccaccacaatcttgatcccagaaaacacccatgattcatcttttacagctgccctgtacttcatattttaagttattaaaggctatttgcttttcctcagacacacattaaactttcctacctcttaccctttgttcaagttctgaacacatatctttcttccccacactatgcttcctctttatcagtttcatgtacctactttccaatgtctagttcgaggagacgtttataaggctacatgatagaggttgcccctggggcgatgtgagaaatcagctccaaaaaggtagctacccggcaaaggatcttagtctgtgactctctcatggatgaacttattacctactgctttgcagagtctccctggactagcctgaataggaacttgtgtgactatatgtgaactaaaagaaggagaaatatgcctaaacttctcatccatctttgtaacagccctaaagtatgcatgttactatcccttttctacacaagtggaaaatatttgtaaatgaacttcgttacagtctaatatttgatgacttcttagttcatatcattatttaagtaacttttctttagtggaaaagcccaaaaattagggaggcagggagagagagagagagagagagagggatcatctgtaatctcagccccagcatctataatcccaatccctgcaagggcctctttgggcaaagaagaaaaaggcactgtgtttttgaagagatccccggtcctatgccaagcctaaccaatttggtagtagagcccaggctggatttcagttggtttgtagtcttctagtcttttcatatgtaaatatttttaatgcttttattcagtgttgttaaaatgccctccaaaagatgcactaacttgtgccaccaccaccaagcagaatatattttccttgaataggctacttcctctttttttcccactcactccatttttattttaaaaatccctggtagagaccaaaaactgaaatgttatattcttgcccaaagaatgagagatgcttcagaaattagcaaatgctccaatataaatcaagtgatagatataaataattcagatatgggataaggaaaatgggtagctttctcttatttaggaactctatgtcaggtttctgtgagaaactgtttacgaagcagtctgacaatagctattggtctgaagtattagtaattagtacagaagtgcctaattctcttgactgcttgttctttaataaaaatgtattgagggattatcatgtactatggcttggcatatactggtgaaaaacaataatgtaggattgccttaataaattttctggtcttgggaaggaacagacaatgaataaatgaataggcaaatatatatgtacttgcaaattgtgatcagggttcagaaggaaaatagggtgttgagagtcaaggaaaaaggagacactttacgtagggcaaccaactgggaataggctatctttaaaagtcacatctaactgagatcagaagtatatgaataagagccagctaggcataaagtggatatataaaactccaagcagagggaacagtgtatctgaaggttctaagtcaagagtaagcttgggccaggcacggtggctcatgcttgtaatcccaacactttgggaggccgaagtgggaggatcacttgagcccaggagtttgagaccagcctggaaaacatagagagatcccatctcgcaaaaaaaaaaaaaaaaaagaaaaagaaaaaactaacttaaaaatatatatatatcaatgccagtggtgtgtgcttgtagtcctggctaacttgggaggctgaagcaggaggatcgcttgagcccaggagtttgaggctgcagtgagctatgatcgcactgctgcactccagcctgggcgacagaaagaggccctgtctgaaaaataaaataaaaataaataaagaaataaaaagcttgatgagttctaggaactcaacattttctaacttcttattagaaatgccaaattctcaggcccaccttacacccactgaatcaaaagcactaagtgggactcagcagtctctgtgttaacaagccttccacatgacaatgagatgcacactattgtgtgagaatcactgccttagactgatgttttgagctatttaggggagggagagggcccattcagggacaatggtggttaacacatgtggctcagaccaagaaatgattgcaagcccaaaaacttgttaaatgtaaaacttcaggcgcagtggctcacgcctgtaatcccagcactttgggaggccgaggcgggtggatcatctgatgtcaggagttcaagaccagcctggccaacaaggtgaaacccagtctctagtaaaaatagaaaaattagccaggcatggtggtggtgtgcgcctgtaatcccagctacttgggaggttgaagcaggagaatcgcttgaacccacgaggcggaggttgcagtgagcccagatcgcaccattgcactccagccggggcgacaagagcaaaactctatctcaaaaaaaaagtaaaacttcatctgtctgaagtaacttctgaatttgaagataaacatcctcatggttgatattttaatggtttatggattattacttacttttaaggaagttaataggtttcattaactgccattttgcttcattttgtcacatataattaaaatttttcagacagaaaatattggtattttttctgtttccttagcaacctaaagcatgacctgcttaaatgacttatttgtgctcattaaaagcctttttgtgttaattgtgtatattttgtatttagcctctgtgaaacactcatgaactatctttttatttgttttaattgtgtcattggaaagcttgaagtattttgtggtttttttttttttttttttttttttgcttgttttttgtctataaaggggagataactggcagttgcagttaggattatagaaacattttcccaaggaaattaataaaatttgttcaagtttcttcttttacaaattgtacttatttttgattttttaaatagtggtaaaatacaaattacatgaagtttactatcttggctctatttaaatgtatacttccatggcattacatacatttacgttgttctgctgccatcaccaccatccatctccagaactcttctcatcttgcaaaactgaaactctatgtctattcaacgataatccccaccaggcatggtggctcacacctgtaatctcaacactttgggaggccaaggcaggcggatcacctgaggccaggagttcgagaccagcctggccaacatggtaaaaccccatctctactaaaaatacaaaaattagctgggcgtggtggtgcacacctgtaatcccagctacttgggaggctgaggcagcagaattgcttgaacctgggaggcggaggttgcagtgagctgagatcgagatcacaccactgcactccagcctgggcaacagagcgagactccatctcaaaaggaacaaaaaagaaaaaaccacagtaattccccattgcttcctgcccccagcccctggaaaccaccattctatttcctgtctataaatctgaatactcatttctatatcttctttggagaaatgtctattcaggttacttgctcattttttagtcaggtgatttgttttcttgctattgagttgtaggagttccttgtgtattttgaatactgaccccttaccgggtgtatggtttgcaaaatatcaattgctcctgctatgttcaacttgttcttaaaaataaaaacttttcctttgtggtcaatacttccctgttcctcatttccaaattttatacatgaaggaaatgtgagcacccagaaaagaaagaagatagacactgttaatatggccaagatataattcggcttttattataagaacattggagttacaagcttcatagaaagccatgtcctaaaagatgaagaattatgatcagtgcaaagagaaaatgttaaaaagaaaaagttatccttttatgtttgggtatatattctttttcgatattgtaaagagaaactagagttttttgttcttgtttttgagacagagttttgctcttgttgcccaggctggagtgcaatgttgcaatctcagctcactgcaacctccacctcccgggttcaagcaattctcctgcctcagcctccagagtggctgggattacaggtgtgcaccaccatgcccggctaatttttctgtttttagtagagacagggtttcactgtgttggccaggctcgtctgtaactcctgacctcaggtgatccacccacctcagcctcccaaagtgctaggattacaggcgtgagccaccgcacctggttgagattgttttttataaaaagatgtggattctttatggaaaacacagagcagttaattgctatttttttaatgtcacaaatttggaagcgtgttgagtctgagaagaaaccatagttaaaatataattactgataatcgcttgggaaataaaagccctaaatttcttcatgcctacaaacttaatattgttttcccaagatcttttttttgactttaacctttcttaagtgtttctgattatgctaaatctaggccattagttctgagtctgtttcattatttatattgttattcagtttactcgtcaaaagtgatcatgcccaaatatgaaagtttacaagaattgccctgaaaactgaacggaaggagacaacgaaaagaaactgcataatattttgccttcaggctatcacaataaaaactgttgctggaaaaaaatgcaatcacatcccttttttttttttaaagtacgtttcaatggcataatttattgtcgagaatgtctctaccagaagcataagtgatactaaaggcagagggttgtattcgctcagtctgcaaagtatcccctttgtcttagctccacacagtccctcagaatttggcagaaatgagggactcaactttcgagaaagggtgacaatcccagttttgttggagagctatgaaatagccccatagtgttagtaatgaaaattcacttaagaagtctcctgcaggcccggcacggtggctcaggcctgtaatcccagcactttgggaggcctacgtgggtggatcacctgaggtcaagagttcaagaccagcctggccaacatggtgaaaccccatctcttctaaaaatacaaaattagccaggcgtggtggcgggcacctgtaatcccagctactcaggaggctgaggcaggagaatcacttgaacccaggaggtagaagttgcagtgagccgagatcgtgccattgtactccagcctgggcagcaagagtgaaactccaccttggaaaaaaaaaaaaaaaaaggaaagaaaggaaggaaaggaaggaaggaaggaaggaaagaaaaaagagaaagaagtctcttgaaaaaaagaaaggaagaaagaaagaaagaaagaagtctcctgtataaaaaaaggaaagaaagaaaagaaggaaggaaggaagaaaagaaaagaaaagtctcctgaaaaaaaaaaaaaaacaaaatataagtgcttgacaactgaagttcaagggtaaaggctattgggaaagcagatgaagttaatctaagtaatggatgctgttggtgccccagtcagattcgttcactgggttggtgcacccattcctcagtgactctgagtattagctgctaaagcctcatggtttcacccctttccagagaacctccctcagccaaaaggaagccaccttgactggcatgtcccaccacaccttctctcttaaaaccaccaggggtacaaagggaaaacccctttgcctcatcatggcacctgctgttgtacaatttgtgatctgggaattcccatggggccagattgatgctggtctccagcccataccacatcccaacttaactttcttgccctgtcttcctgcttctctcactccctttttcttaagagcactcagactctgcttctcttaaacctggctgaaggcagtaggtatctgaaagaaaagctgtacctacattctgggcatcagagcagtcagggaaccaaccagaatgaaaagtcaaaaattacagataatgatggaagtctctgagcctgatacatttcatgaagggcttgcttacagctcaacttgtgtttctttttaattgtttcaacagcatttgagtagctcattccgcccaggtatttgagagattccagtaggcctctgatcctctggaaaaagcaagatacagtccttgactctcttggccccatgaggatgatatatctgctgagaaatgcaggagctgcaaaacatagctgggctgtacctgctgccaattcccgggtaattgcattctgtgagggcttccctgaaccacgaggaagagccccggaataagtactaaacaccagtatttataggacatgatttctaattgctcatccttgccttctcatgactagctcagcatgaagaatgctgggacttttctttcctagcacctcctctttttaggctgttttccaagagtcttggttaacaaacatttgtttgacaaggattcatggtagacagcaatgccattagtccctacttaagtaatatttgtaacataaatttctctgcacgtgtatgtagcccaagaataacacttcatttttggaacctagtaattttgaattcctagtaagtgagataggacgtctatgagttagcaggttaagattttaggaggaatatttaatatccctaagaagggaagtttttcaaacactgagtagcactatatatatttatatatatatagccagatttctatctatctatctatctatatatatatatatatatatatatatatatatatcacaccatttataaataaactcataagtggcaaatccagtagagctaatctgagcatcccagagtctcccctctctgtcgcttgtttgtgcagctactcctgctgtggccttttatggattatcctggacttctacaactgacccctctactttctctccatctacaagcttcattttgctttgctttcctcctaatccagtttagattccacagtatattttttcaattacatcctggctaatatcgaaactcccttatccctaaatgtgtgagccacagtcatctgacgaaaccccaaacctggatcaactgttttccccatgcttacatgcaacactgttggagaaaatgagaaagtcaggcagattggttctgctaaaaaatgttgaacctcatcctcaagtgggccctcaacactgtttgccaacctcattacatctcttaggtcaactccctctcacagtctctattacgattaattcaaatgttcccacttacccttaattcatgttttcattcagtgactattcattgcacaccaggcactgcacgctatgccaggcactgcagactatgccaggtctgttgattcctacttcacagaggaaataaaacccctccaagcagaattccctcaatttactctttctagtctttccaactgaccttctgtgctttgcagtaggaatgttctcttaactgtcaagtcaaaattcctccctcaaaaataagattcccttgttaatagacaattcctttattttcttagaaaagtagtagatgactataattttaaatgtgtatttgaacaaatccttagctacataaagataagcaaagatatgacaggcaatttaattttatatgaagaaaaacttattatatcagacttacctatcattctaaatcagtacttttgtatctataatcagacaacatttaatgaactgaaaattctgcctgtgagaaactagtcataataaaattagacttggtttgctctttcatggagaacatattccagatgtttaagtgattcaaagaaaacccacaatataatggctttcttcaatgttttctcacttactgcttccaaactagaaaaaaaacctaatgcaatcctgatatcacttaaatagcacctcgtattgctcagcgttaactgtgctttttgacattttaggtgtagtgtttaataatttaaacacaaatttatgtgtgtcatattaaaagctctaatctgtgaaatatagccaaaccaatgtcacatctatttaaatagcaaagtacctgtgttcaccctttacagggtgaaggtcttgtgactctgtgtttaggcggccatacttcttgttatgtatgctgctgggcactgagagcccacagtggtgagccatccttgggtggtaaaagctgctaccaaaacctaaatcaaatgccaaagtgaagactgacatgagcattctcctgcctccttttcctttttatctttcctaccatctgttatctcctttcttccaccttcatgcgttgagtgccctcatgatgatttctagctgactgaagtcctttagtctgctcaaccccatctagagacttccccaaagtgaacctttgcccccagttatctgtttatcaactgacctcacaccagtcaaagcttccattgtcaaatattttaacagaaatttaggaattcagattaaactgaatatttggcattttttcttttttttttttttttttttttggagacagagtcttgctgggtcacccaggctggagtgagtgcagtggtgccatcttggctcactgcaacctccacctcccaggttcaagcgcttctcatgcctcagccccctgagtagctggtactacaggcatgtgccaccacgcccgaataatttttgtatctttagtagagacagggtttcaccatgttggccagtctggtctcgaactgctgacctcaagtgatccacccatccacccacctcagcctcccaaagtgctgggattacagtcttgagccaccccacctggtctgggttgttttcttcatctttagcagttgtcttgttcacaactacttcaacaatatttattttctttttctttttgaagcaactctccagagtatttggcctggtttttatagaaataataacttttttcttttctttttaaactaatatttttatgatttaggaaatctttctttattaaattacataatcacaacagttactggcaaagataggtttgagaacatacacacaactgacggttgtaacaagtcaactgatgggagcagaaggtccacacatactgacaggcacctcgaacattttattgaggctgtgagaggttcccatcactgctgtttcacaaagagaatgaagactttggctaatttggtgagtcttaagtggagattagttcagagaacttccactatcattgcttgaaagaagcaaaaaaaaaaaaaaaaaaaaaaaaaatcccaagatcttatggtaaagtttaaagaagaaaagtaaattttaaaaagaaaaaaaaagaggaaaagggagagcattgcaattaattatgagtaccaaaacttatttttgaatccccttcatcctccaaaacattgaagcaggattaatatgtgtgctcaggaatttgggagagaaaatgaaaatcaaaatattctaataagagacatttgaaaatgtacattgtgtcacctaaagggaactgaaatctagctatggcttaacgaggtaggataatcaacttaatggcttgagagtcttgcttgtaaagagagatgattagcacaaaggactcacctgtatcactgaaagatgctgcctgctggcttgccctctctgcagaggttcctgtttacagtttcccctcacatgatatttatttgtggctactagaaatgcacgttattatccagaagagaatgatttcattttgtaaccgttgtccttgtccaagtttcccccattgacatttaagaaatctgttttctaacctttctattatgcaaaacaaaattaatatggatcatttccttttagagataagtattcatatatatggatttaaaccacctttctccatgggcccttattctgatacttttaatccatgtatttattcataaggaaatggaacaatatttactatccacccctataaaactttctgaatttcacactgattccagtgacattccactaacacgaagttgaatacagatgaatacatcacatatgattttttttttgcatgtgtatggtcagaaggggctctcttttgtttgtttttattaatatataattcacatactttaaaattcactctttcaaagtgtacaattcagtggtgtttagtatattcacaagattgtgccaccatcaccattgtttaataccagaacattttcgttatcgtccaaaagaaaccccctgattgcttaacgtaatgtttttaatgaccactttttaaaactttaagttcaacagagtgattatcacaatgttttgtattatctaagaactacacaacagtgttatgctctatacagcaccacggtttactgatgaagtattcaggttgatttgagaggataatgtcgttcttattttgaatgttcatactggctccttttatttggagtgggaggaaatgcaaggcttataaatgaggtcagtgtaaccaatggttttatcaacatagtgaaccagacagagaaataacacctgcccagatcaagcaagtcaaaacaacacgtatagtcaagtggtgctgtccttgtacacagacattacattacacaaactgttctcctaagtgagggaatttgtcccttagaaattgcttattggaacatttggacatcatgcatcatgttaaagatccataaatgccatctcgatagggtagatatgaggcgtggtaatatcctccccatatctgcatagggttcttctgctcaacggattgctatgatgtattgcatcagagactcctgctctagtgcttcaaagacagctgagaagccccacgggagccttctgaagtcattgctacaagggctaaaataccaggagatcaggaagtcattctgaggacttgacaaaataccctactccctaaatgaaactgttatgatgtggttggtgcaaagtatgcatgcaatattttatgactgaatatatctttctattgtaaaaaataaggatccatttctggttgtgacatgagtagaatttagaatccagcagcaatatatttttcttgttactttgccaatccagaatttcttaggggaagcatataacataatagttaagaatatatattctagaggcaggcaaacctgcatataggtatcccaggttcctcaatttttacccatgagagcttggcaaggtttgtttgttttgaaaacaaacctctgcaagtttgttttctcatgtataaaattagaattctccaactactggcctcataggattgttgggtagaaataaaatcagtttatgtatgaatagagctcatcatggcattaggcacctaggaagtgctcaacaaatagtagttatcattattcccccattaacaaatatccattgttataatactaccacaagagactgtcttagtctgttccagctgctataatagaaatgccataaattggatagcttgtgaaacaacaaaaacttatttctcactgttctggaggttgagaagtccaagatcaaaataccagcagatttggtgtctggggaaggcccattcctcatacaaagcaccttctcactgcaccctcacatgctgaaaggagctagctagctctctgaggtctcttttataagggcgctaatcccaaaaatcacctccctaaaggccccatctcctaataccattgccttaggtgttttgatttcgtttcctttttattttttaggatttcaacataggaatttgaggggggacacaaacattcaaaccgtagcatagagcaaacattactggcactgcaccctaaagagaataagcccaggtatcagttcttcttgttttaaatattctcatcttccaatttgcttttgactattgcacacaggcacttcgaggagaaattgcgcctctgaaagagaacgtgagccacgtcaatgaccttgctcgccagcttaccactttgggcattcagctctcaccgtataacctcagcactctggaagacctgaacaccagatggaagcttctgcaggtaagcacattgtaaacattgttgtcctttgttacagtaaaataatatacagataaaatttgtaaagaacaatgaaagtacttttttcatgtaatgttcatggtaatatttgtgaggataggatattttatattagtttataattcccatctaaacattttcaaattattaatattaattttggaagcaactaagacttagtatatgtcttagtctgtttagtgttgctataaaagaatacttggggctgggtaattcataaagaacaggtgtttatttggctcagttctgcaggctgtacaagaagcatctgcttctggcgagggcgtcaggctgcttccactcatggcagaaggcaaaggggagctggtgtacaaagatcacacggcaagagaggaggagaaaaagagggaggggaggtgccagttctcatgaaaactgctagagcaaaacctcgctcactaccgtgagaatggcaccaaaccattcatgagggattcactcctacaacccagacaccttccactaggcctcaccaccaacacgggggatcagatttcaacacgcgagttagagggaacatccaaactctgtgtagcagtattcttacgataaacagaaaataatgctgaatcatgatggaagatgtgaattgccaccatgcagttcctttgtactcttactgcttggattctcaaaaacatctttccctttagaatcctaatttaaacaagagtcaatagtaagatgtgtccaaaagtcatttaaagaaagagcatcctatcacaaacttacatgtggaagtttttcgtaggtttgcgtaataaatacaggcaatgtaagtgtgctgctcaaggtcacacttactagccatgggacctggagcaaattacttaacctttctgagcctcagtctttcatcaaaaaaaaaaaaatgcgataataaaattctctgcaatatcagtttattattaggatgaataagtcaaaataaatggaaagtgctcgggagcgaacatgccaaatgataaacactctacaaattctagctcttgatgttgttattattattattattacagtacacaggttttggaatccaacatattagctgagtgaccttgaggccacttaatctctgtggttgtccatttactcatctctaacatggttactgtaacatcgaatgagttaattcatgcagagtaatggttgtagtggtggaagaggtgcgtctaccttctcagtgtgaaggacaccatgttataccccaaaaccctaaaattagtttaaccgtagaattagagaatcattttctctcctttccaattttctcctttccaacaggatgcagaaggtatgcctctgaggaaactgggtttaaaactatttggttttaactttttaataagaaaaatataataaaccaaatcactttcctattgtcagtccatttaggggtgtgattgagaggcctgttaaagaattgctagatctttaataaagataagttgcaaatcccagacctcttgagatctcacataatttaattcttgttgtgatggatagtcctgaaagatttgtattctagattgttataagtggcatcgactaaagcaaggcgatatagctaagtgattatatgcctttctctgtttgctccatagtagttgagtactattaaaattttatctgttccatccttagtatgtttttcatcttaagtataaataaggaaagtaataaatgtccaaagaaaaccaatggccacattagtcccatataagtgttctagaagtatattttataatttcttttagagagcagaatgccacgtttgctttcagaacgtggtaaaagatttgtgacagtggcaggtagatttccaaatgaggtcaaaggattatgactagtaagaaaagtttttttttttttaatcaatgctaagtgatccattctagttgcactatttatttgcatttaaggtatcaaaaacagtaaatagcttactatgtagccattctttacaatgagtaaaaacttggttataagtacaggaaaacacatgtaaggagatagtatgatatagcgaaaagagcattggattgactattaggaggtctaacttcaaacttaagctcagccattatttgaccgtgttattgtgagaaagccatttaacctctctcagctttaattctcctcatttttaaaatgcagaaatctattttgtctaaggtcacatacagttcaatcttatgattctgtctctagatatctgggggagatacacatttgacagaatttagtttaaaaccaatgaagttcctttctttattcataatacaaatgtggtttgttgaaattatatttctccttgtataactctaacttttaatctcttcttccctaaacccacatatacacagccttctcctattaaacagttcagtttgtggtgtctgctctatattgtagcaaatttcatgtttctatttttgaacatgaccttaaagatatgcttaaaaagtgtttttagcagaaagctgataaatccaaggttttggtttgcatataaccgagtcaagttagttccattcttttctttgatagtaattctgctacattataaatgtgaggccttgttcagaaagagaagaaagcaagaaatgaggttcacatcaagcaatttttttcccattactggaaaagcaattcatacatcctgttgagaatattttatatttagaacaatgtatgtgaggctaacgcattatccaagttctatggcgggaagcttgagcccaccaccattatgacatcatatttttttaaatagtaaatgtcaaaaaagacatatttctatgaaaataaagaatttagtcacaatgctatgtcaatctttaaatcgtgataaaaaccaagtacaagttcatctttgcctctgtccactaagacaaagaacaatcaaaaagtaaagaactctctgggcatggtggctcacgcctgtaatcccagcactttgggaggccgaggcaggcggatcacttgaggtcaggagtttgacaccagcctgaccagcatggtgaaacctcatctctactaaaaatacaaaacttacctgggtgtggtggtgcgtgcctgtaatcctagctactctggaggctgaggcaggagaattgcttgaaaccaggaggcagaggttgcagtgagctgagatcgtgccactgcactccagcctgggcgacagagccagactcggtctcaaaaataaaataaaataaaataaaaatagagaactggagtagtagaaaggcagatgtaaacctgagaaaagaagaagagtcttaaatttgggcaaaatagtataatagaaagattagagttacatactatcaggccgtgtctacttgatatcagaatatcctgggttctttgcattatccattcatttaattttcaaggaaagccatgctagttttttagctgtctgtaatatcagtcaaaatggtgaaaccagttaagggatgtgagcaccaacaatacagtcaaacccagtcacaatttacctatgtatagaatcataatgtatagagaattccaaactgactttgaatcttctaatagaaatgtaagagacattggtttgcctgtttgaaattttctgtgggaatgaagtcctattttcttcctcaaagtagacacattggtatgcatgttactatttgaccatttgactttttgtggtgtaggaaaccatcactccttgcagttagaaaaagtcctcatgtgcattctctcatctaagaatcacaaccttgtgattttgtattatgattatgattacctattatcattattcccttttacgtgtaaggaaaccgaggcttagaaacatgaagtaccacagtcacagtcacataacttgtatcagtcaagatctgagtcaggtttttcgaactgctattcccatgctctttttgtctcctcttctcaaaatcctattacgtttggacttaacaaagcaataatggctgggtgtggtggctcacgcctgtaatcccagtactttgggagggtgaggcgggtggatcacttgagatcaggagttcaagaccggcctggccaacacatagtgaaaccccatcactactaaaaatacaaaaattagctgggtgtggtggcgcacgcttgtagatcagctacttgggaagctgaggcaggagaatcgcttgaacccgggaggcggatgttgcagtaagctgagatcatgccactgcactccagcctgggcaacagagcaagacaccatttccaaaaaaaaaaaaaaaaagcaatactttaaaactattttggacaatacaggtgtaaaatacttcacttttttacatgtatcttcttttttgaaatgattcttaggtatattaacttttaaatcttccttttataaaccaatggattaatgaacccagttcagtgtaccccttagaaatcacacttgtttcaaatataaaattttaaagcattatattcctcattgcctttagaactcagcaattgtactaaaatcagccaaaagtgatttcagtgaatcagctcttaaagccaaactaatgctaatatttgaccaagtagaaacgaatatctaaaccaggtgagaaaaaagttaaaatgatgataaacctttctaattttgaaatagtacacacactgagtaatgcagtcaatctctttattcaccaagcgcaagtagtatataaaggaatattataccatttttctttactcatgagtaaacccacaaatagcacaaaagctgcaaaaacactttaacataaggagtatttgttttattgactgtaggaactcatggaatgcaaacacctttaaaatctgaataatatgaaggcatttccagctattagattctttacatatgtcaaagaacagtatcataaattatgtatgttttttaaaggtttcctaagcttcttccaaagtcatgtagacatcattacactccatctgtatacctctgtggtaacttgctgtcgcagggatctagagcctcatcttttgcaaacttcattccttctttcatccctttgttctttcattcagtcagcactgattgagcatctactgtgtacctagaagacattgtaatgatcctgtttggtccaaggacatactaaacaaaactccctttactgcttatgctatattaagtaaagctttaaagatgggttctcttttattacttccatgatggcccacccctctcatcctttctcagtgttaaaaaccagaaatatacatacttacatactatcataacactgatactacaaaagcagtacccattattatctctggtttacaaattattcaataatttcttactggaaacttggtctatatagtcatagtagtaagctttgtgagaggatgtgatgggatcatagttagctaaacaataggagtatttgtgtggcttcattttaaaaaaactaaccagtttttttccaacaagcaattcttatatcagaaccatttatattctttactttggtgagataggattttctaagcaggtcttttatctgtatctatgtatgtttgttcttaccatcattgagcacaggatttgatcctttaaatgtgttgacagattttgaacattttcctcatatctttcttttttgttttttaatgatcctgtactaatcattttgcattatggggtcacttctggacagagagcctagccatctgctcttacaaataatgtcggcctatcactaactggggataaggagaagacatctaccgatgtctttctagcatgtccttcttgactttttctttctttaagaagactaaaatgattcagcttgtggttctaccacagaactcaggagaaaatgataaatatgaggccattctccaaataaatatgttttcctacattagtggttctcaaattttaacaagcatcaaattcacctggaaggcttattaaaacacagataactgggctccacataccaagtttcaaatgattcagtgggtctggtgtggagcttgagaatctgcatctctaacaaactttcaagtgaggctaatgctgctgaatcatggaccacactttgataacccctgttctatgttaagtacttgtcaggtacagacaaatttaaaagttaaaaaaatatatatatgacttctgtaagacactgtgaagggtttagactctggggaaattaagtataatgccatcccaaaaactctgtgttggaggagtgttcaagtgctgcaggatcatggagaaccaagcacttaacttttctatgaggcagaaagaggaagataaagggaaacgtggaggatgaagggaaactgttaatagatccccagaaacacaatttgctgctatatggatttatatttactgtatttcaaatcacatggtctagaactgtgctgtccaatatgatagctacatatggccattgagcccttcaatgtagccagtcgaaagtgagatgtgtagtaagcgtaatatatacacatgtaatatgtatatgttatatatatgatatagatgtaatatgtatgttatatatatgatatatatgtaatatgtatatgttatatatatatatatatatcaggatgcaaagacttagtaccaaaaaaagaatgtaaaatatctcattatttttatattgattacatgttgaaatgatagtatttttatgtatttgcttgggtaaaatgtcataatgaatttcactcatttattatgattattcaaacttggttatttttcttgaaaatgaatgaagtgagcctgttgcttcggctacaacaatgggcagtgtttctgcaaaatttttacatgtgcctactagaacatttaaaattgtacatgtagcactcattatatttctgttggatagcattggcctaaaagttttcaaaatctagcatggataagaatcacctgcaaagcttgttaaaccaatccgcccccagaaatttagtatcgggtgaggcctgcaattctgcatttctatcatgctcccaggagatgctgtctatttgtaaccacatatagaaattcattcccaaactacagatgatagagttttacagagaggtgcaaaaatatatttttgcatcaagcattgtctgtagcttgaatacaaaattatgttgcccatataccactggtttttgtaagtaaagcagttgtgttacaaagcatacaagtttttatcagctaatagccttttctcaattagcagatactaagtagtacttttattatgtggcaattctccagtttttggaatgttattgagaaatacacagggttaaaacaaattagaaagcacctctcccaaaatactgcagtaagatgtaggaaaaactgctctaacatattctaaactataggttgctcttatgtaaatatttcaactataatatctagtctgatgtgcccactggccagagttttgtaaaagctaaaagtaaaggaaataaaaaaaagaaagaagtatgtgtttgtttttgaaaaggttaggtcacagaaggatttgttgatattaggaatagaatgacccgtgaaaaaaggacaattaagttccaggaaaacatcttttcagtaaggagagaataatcatttatgcttaacctcaactctgttaggaaaaaaaggatgtaaacaaaaccctttaaagaattgaagaaggagagtataaatttaaatgcccaggttagtgaccacccttagagcatactgaggtcaaagcgtactgtcaagcttaagaacatttggttttcaatgtttgtacaactaattgtactttagtcaagaggactgttatcgaaattgctcaggtagccttgaaactaatatggcccaaatattccagagtctgtctttctcaccctaggagaagaatggtctggttttcaagggaattctctattttttttttttgaaggcatcaggatgtgtgaaactacagggggataaatgaacgatgtacagaatgtgatgaaaaaattatatgaagtataaaatgggaatgaagccatcaggagccaaagaaatatttatgaatttaagagaatgaaaagcatattattattttcagatattttataaagtgaacccaaatcattataaagtattaattaggctacttgattgcttgatctttatatactaatttctaatttgttttaatcgggaactatttttgctagttctaaggctagctattatggtaatccatgtaagtgtgtttattattgtttttaaaaatggaatgtgttcctagtaaatgtgtttaaatagcaaaatgtatttatgcatgcatgtatttattttagtttcctgagacctctagttccttactagaaacatgtatataattccaggcatttaaaattgccatgatggtcatgttttcttgtccttttcccttattctgcaactgacatttgcccttgtctccaatttctcactgctttattctttgttcttgtaagtgttcttgtctctctgggctgacctctctccttccctggagtttgaccccgccccaccctttcttctgcatttgtttgcactggttgttttcttcattgcctttcccactgccccgctgcgctgcatgtgaaacactccgccagtagctgctcacagttcccatgctacatcatacccagcattcaaagagctgctgttctcacatggccgccagtaagattcccgactcctccttcacagcacattcctctagaaagtagaaagaatcccctttcaggccacatgagaagctgcgtgttaaagccaactccataaaggggaatggaaactagcgtatgaaattcagaaatgctacttttaaaggtaaataccacaaagtgaatttcaaattcatacagtttatcataatacttctttatttttataaatgctataatgtccttaatataatgatcactgtgatataagttgtcctctcccttaatatattaattaatttactaaaggagacgggagggtggaaatataataaattagaagatgattcttatatcagaagtacagcctttatacatagttttactttattcagacaatcaatgtagtcatatggtataaatttgaaaataattttagtgagcattacgcttactgagattaatagtgagaacttacctagcacttactgtatgccattcacaattataagcacttttgcatgtgctaatgcttttaagcctcacgtaacccagtgagggaggtacaattttaacctcattttacaggttagaaaaatgaggagcccaagggttaagtgacttgcctgtggtcatatatcaggtaagtgagagagccaggatttgaacccagacagtctgcctggggaatctgtcagaactcctaactatgcagtaccactcctctgataaaaagttgaattgacatgacaacatttcctattcatttatgattcgaccctttaaacaaaaagaacagcatcattctcacatttattaatttgtcaggaatcacctggatcatgagttgaggaaatttaaagtaggagggttgtatgaatttcagaccacgatctcaagaattgcctgtttaactcagagcctgaatcattcacagactaaaaactagaatcactcttctgtaggaccaagagggttgaatcatcaaagtcttgctgaagtgaacggaaatcctcctttgttcaatcattcattcaataattatttttttctggtgtctactctttaccaaactctgtttgagatgatagggattcagtcatagacagaccttctctgccctcatggaggttatggtttcttgggatgacagacagtaattttttaaatctcataaaataattacaaatgtgtcaggaaagaaaatacaggacactaccagaatatatagtaaggacctaaatgtgtgtgtgtgtgtgtgtgtgtgtgtgtgtgtgtgtgtgtgtgtgtgtgtgtgtgcgcgcgcgctgcagtaagggtgagaggcaggaaagggcaatcaggacaccctcccaataaaagtgacctttgaccgagatctgaaggatgaagacaagctgagtgactcttctattcatctatatcttttgttttaaatggcctgaagcctgggactaactaaacagggttgtaaaattccagtatgtaaattgaataactagggatcatttgaagtaatggactgcagagttaatgtataattaagtcacatctagggaagatttcccatcattatcacagagagcatcctgtttgctttcttcacagcacttacgaaaatctatagctatgtgtttggtggcttgtttaatgaaagtctgtttcccctatctgaatgtgagctccataaggacagaggccctgaataccacatctactgacatttggcagtgtctttcatatagtaagcattctataaatgtcttgaatagatgaatgcataaaactaagttaaaatgttactgaaaactataaaaataagcagaaagttataccagaggagaaaaattaggggaaaaaaactataatttctgaagacgtagtacttacatctaaatttgtggcttcataaggttaaccaacacttaaatagttttgccaaaactccaagaaaaaaatgaccgggtgtcgtggctcacgcctgtgatcccagcactttgggaggtcgaggtgggtggatcacctgaggttaggagttcgagaccagcctggccaacatggtgaaaccctatctctactaaaaatacaaaaaaattagccgggcatggtggcagacacctgtaatcccagttactcggaaggctgaggcaggagaaccacttgaacataggaggcggaggttgcagtgagccgagatcatgccactgcactccagcctgggcaacagagcaagactctgtctcaaaaaaaaaaaaaagaaagaaagaaaaaaaagaactaccatttgacccagcacttccattacttggtatgtacccaaagaaatataaatttttctaccaaaaagacgtgcgctcatatgttcattgcagcactattcacaatagcaaagacataaagtcaacctaggtgcccatcaatggtggattggataaagaaaacgtggcatatatgcaccatggaatactacacagctatgaaaaagaaggaaatcatgtcctctgtagcaacatggttggaactggaggtcattatcctaagcgaattaaagcagaaacagaaaaccaaataatgcatgtgctcacttataagcaggagctaacctttgggtacacatggatgtaaagttgggaacaacaggcactagtgacaagggcaggagggtgtgggacaagggctgaaaaaactacctatcgagtactatactcactacctgggtgacaggttcaactgtactccaaacctcagtgtcacacaatatacccatgtaataaacctgcacatgtaccccttgagtctaaaataaaaattgaaatctaaaaatataaaatatcaaatcataaaaataaataagaaaacaattgaatctactgatatgtttcattgcttttaaaatatccactttgaattactgaatattttaatatttttagttttacacttcagcacagaaagtccagaaatccaacccttgagtttacaaagacaccacatgatagttcatagttcacacagctagttagttgtggaactagaacccaaaatttgctctctatgtctctcacataccttttccctttattctaataaaggcatttgtcagtctaaatgtacaatattcgaagacattttttaaaggaactacttatccaaatcccacctgtcttacaaggtccatgtgaagcaatgagataaggtctgtgaaactgcttccgaaactatcaaatgttataaaaatgttaagttttattattagaactgcagttcatctctatgaaacctttctaaactttctcacttttctgaacttgactacgcagcgtcttttctaatctatttgttctccctttataagaagaatttaatcctttccgccctgctgggttgtaagaaaaaggactctcttcttttctataatctattgatatttgattatattacacatctaatgggttcccaataaatacatagtgaatagaattgaaccaaatttctttctagacatgtgaaaaaaaatcctgatctttaaatagaaagggtactttcaaagattatatatagaacctcttggtattttgtatttgcaatgaaaatattttaatttgggccaggtgcggtggctcacacctgtggtcccagcactctgggaggccgaggtgagcagatcatgaggtcaggcgttcgagaccagcctgaccaacatggtaaaaccccgtctcaatcaaaaatacaaaaattagccaggcatggtgacgcatgcctgtaatcccaactactcaggaggctgaggcaggagaatcacttgaacccgggaggtggaggttgcagtgagctgagatcatgccactgcactccagcctgggtagagagggagactccatctaaaaaagaaagaaagagagagagagaaagaaaagaaaagaaagaaaatattttaatttgtcttatgttcaacagttgcatcatatctgcatccttttgttaaaattgaacaggcttctagtttcatataataatttctggccaggcgcagtggctcacgcctgtaatcccagcactttgggaggccgaggcgggtggatcacctgaggtccggagttcgagaccagcctgaccaacatggagaaaccccatctctactaaaaatacaaaattagctgggcgtggtggcacatgcctgtaatctcagctactcgggaggctgaggcaggagaatggcttgaacccaggaggcggaggttgctgtgagccaagatcacgccattgcactccagccggggcaacaagagcgaaactccgtctcaaaataataataatcataatcatcatcatcataataataatttctaccaacagctggcaggaaaaaaatatgagagcatagtcatgaacttcagattccactccccttacttttggcattccattcctctgaattatagcttatatttctttattatctcagtttgatttagtctttctaaatattcacctctgtttccatccataaatatcgactgaactaccttttaatatactatctttttgtaacagagaaaatcaagtgtaggtggattattgtaagtgacactgaggaaatataaaaagaccttgacttgtccaggcgcggtggctcacgcctgtaatcccaccactttgggaggccgaggcgggtgaattacgagatcaggagatcaagaccatcctgaccaaatggtgaaatcctgtctctactgaaatacaaaacattagccgggcatggtggcaggcgcctgtagtcccagctacttgggaggctgaggctggagaatggcatgaacctgggaggcggagcttgcagtgagctgagatcatgccactgcactccagactggtgacagagtgagactccctctcaaaaaaaaaaaaaaaaaaaaaaaaaaaagaccttaacttgcttcaaacaagtcaggacccccaattccaattcttaggtctggcattcccatcagacacttaaactgtaggggcagtaaagttgcccatgtggctacagcttttgtggctgtgctgtacttgggaattttaatgttaccctctttgaattaggtccttcattgatcatgcatctcaaagtatctcagtgccacataaaaattttctttcagagtcatattttcccattatgaatgctacctactgcttatctgttgagtgtacacttttaaaccttctgtgggtggtggcccctttgccactgggtgagttagatgctgatcctggtcattatcgctgcctttccagccttttctgctcttacaccaagcacaagaattctctgctgatagtcaggatctagggctgggaaaatgggatgagttgtcctgttagacaggcccaaaaggagtattgtttaatccccagggtgtggggaagaaagatactcttgttttcttttccccaaatgtgtccatatacacccttctcctttgctggcagccaccaggcttgttgaggatctaccctcctctgcatatcatgtgcatcaagggaagccccaacccaagggaatacataatgatagtcctgagctatttcatggtgctctcgcagtcttgattgccctcttcggaattggacatggtcatattacgcaattttaggtaataaaatacaaagggcattcagctaagggaccttctgagaaaggtttttctcgtctagagaactaaacaggcatccttctccgggcactatgcgtagttctttattctacctggaacattctttctccagaaatctttgtgactaactctgtcatttccttcaagtcttattcaaatctcaacttaaaaaaaaaaaaaaccttcttaaaatttgaccacactaattagacagcaactgccccatctccctcttcccagccatctgaatccatttcccacttacctttttatgatagctcttctaggaaggcactccctcctccctgtgaatcatgtctccaggcaattgttccttgtgtagaggaacacaccaaatctgggctgctcctgtacaacaaactgaaggaggtagaattgattctgcaagaagttcaaagctaaataagaaggagtcttgtagcttctgtcttggtcttctggaatgctcactctggggaaagtgatctgccctgtactaagtctactctaaggccactgtgctgtctacatgaagaagccacaaatctaagctagccacatggggaagctgcatggaaagacaaatacgtggctagcccccagctgttggccgaagatccgcagccatcccaagtgaggagccagatgtacaagtgaaaaaactgtaacagccattccaatggagccttcagatcaattcagctttggctactatctgactgcaaacacatgaaagaacccaagcaagaaacacccacctgagcacagtcaactcacagaaccatgagcaatactgataaatggttatttttagccagtaagttctagggtgatatatagcaaaaggaacatctgtcctgttttttctggtttttcctatcatacactcattctgcaggattaacatgtgtaatatactttttttttttttttgagatggagtctcaatctgtcgcccaggctggagtgcagtggcatgatctcagctcactgcaacctccgcctgctgggttcaagtaattctcctgcctcagcctcccgagtagctgggactacaggcatccaccaccacgcccagctagtttttttttatttttagtagagacggggtttcaccatgctggccaggctggtctcgaactcctgacctcgtgatctgcccgccttggcctcccaagtgctgggattacaggcatgagccaccactcccggcctaatatacttttttaaattgtctttcactatgagaaggtgagctccatgaggccagggatattgtctgttttgttagctaatgtatccaaattacctaagaatagatcttagcgtggtaaatatttgttgaatgaacgagtgaatagatcagaatttcagtagctacgttgtgagtatgtggacagttcaccaagaatggcagaatggaaggatgggaggaacctggaataatgtcattgtgcttctggattacccagtcctggagcagctttgcctctgtgggccttgactagtcaagacattttgtgttgggtttttatgttaattccatttgcatcactataaaggaatacctgaggctgggtaatttataaggaaaagagatttcattggctcatggttctgcaggctgtacaggaagtgtggtgacagcctctgcttctggtgagggcttcagcaagcttacaatcatggtggaaggtgaaaggagaaccagcgtgtcacatggtgagagatggagtgagggggtgggaggtgccacactcttttaaacagtcagatcccacatgaactcactctgagtgagaactcacttattactgcaagaatggcactgagccattcgtgagggatccagccccatgatccagtctcccccaccgggccccacatccaacactggggattacatttcagcatgagatttgaagggaacaaacatccaacccatatcagttttctacaacctgcagcagaaagcatctcatctggcacatggtcttgcaaataattctgacttagatgcatgggactcagatatgactgaaccagaagataaatctaagtagcagacaccacagtattctcaaaaccactctttctctttctcttgttgaccgaggcttttctactgagcaaagcacctggtttataatatgttctttcattacgccttctcctaagagacctccttagtgtccctgcaatggatgtctggggagccaccaatctcttagagatgactagacatgtagccccagaaatggttacaccttgagcttttctctcagtgcagatgagatacattgcccatcccaccaatttgccacatttatctaaatttctgtgttaagctgggacctctaccactcaagctgggatgcccctcaccaccaccacactgcaaaaactaaacatttttcattagcctcctacttgcaattaagtacataaaacctgcaaaacaagtaataaaattaaggcactatttggttaatgccttttctcagaaatcacttttgcatgaagttcagttcagtattttatcagtgactacattagtctcgagaccctctacccaataggagggacaaagatgtacatgacacaggctcccttcaaagatgattaatacatgaactacatacagtattacaagggctccactagagatgtgagccccccagaaatgatattaatgtgcagaagagttagcaataaattttgcacaaggggtgacatttgagcttagactcgagcaatgagtagggttccaagaggtaaagaaaaaaatggaatggttttctaggaagaaaaccaggtctgggaagatctgatataacctgaggtagtttataagtctggaatgactgagttatcgggtatatggtggggaaggcagcagaggtgaaataagtaatatctaagcaaatgaaaaacatgtaattaggggagatgaaatataattaaattatttaccttaattcctcttttgactctttacatttgtcattcataaggaaacaatttcactaagattgttttgacctttttaccttatttggccaagtaaacaagggacagaaagtttttaatgtaaaatattcattcaacctgaaagaacattgatgattccagaccatttaaagttaaatattttagagttctcaattatttctatttggatgagtagaaccttttttcagacttcaggaatatatgtttagtttttaacagactaattgttcctgctttcatgccagcctcatgggcatcagcaggttcaaggttagtaggtaggaatctgccccctaagaatgcagcctaagagttaaggaatgcatgattacccctgtaattacttgagaggggctctgaaattctggcagggttggtgaggccaccagataacactgatcaagaatgtacacgaggttaggaattcagactgtagctgaagtggggagttcgggtaaacaggctctgaatggaaaagatcaggaattcaaatagacagttaagtcaagaaaccaacatcttagaaatgtaaacctcactttaagtcaaaggctctccaagctaagacttcataatatatttgccaaggcaagagctagtatctgcttacctgagtggtcctggagctgcggccagttgaaacaggagattgcagatggaatgtcagttagaatactttcagaggccagtaacagatacctgactttaaagttcttaagtttgtctttcccaaggttttctggtcataagaatcaccaggggcacttgattaaattattaattcacaagccccttcactggagattctgatgcaatagacttgggaatatatttttttttaacacgaactccagtggaatcaggcaagaagtgaaaaccctatcgttaataatagacacattagaaataatagagacatttgataatctagcacagttcccaaactttagtatgcatcagaatcccctgggggcttgttaaactacaggctggcaggctgctcccagcgtttctgatgcagtaggtccagcgtggagtccgagattctacatttctagtaggttgccaagttatgctgctactcctgtggtcaggaactgcactttgagaaccactaatcaaaataaactgaagtccaaagaccatcagacctagagctggttaattcaacagattagctatatcaagacttgaggtcagcttctctgggattctcttgtctttttcctcatggtcccaagatggcttcccactgcgccaagcaacatatccgcagacaacaataaccaaggcaagaaggaataaggttcaaggataactgtattgtgtgcgtgtgtgtgtgtgtgtactcatgcctgtgtgtctgtgtttggaaaagcaaacgtttcccagaagctccccaacaaatttcttcttatgtgtcaactagaactggatctcactgaacctctttaagccaatcactggctatgagaaacaagcttactgtgattggcttagaccagattttaattttttcctcagagctgtgtcctttgttgcccaatatctgaacataattgagcttctttaccaaggaacaagaagtaaatagctgttagttaggcaaatagctgggtatgtccacaaatgggttctgaaacaagtgtgattataatgaggttcagaattgaaaatattagtacaaatgctagtaaataatgtatgatattggctttcttatcaccatttgcaacagaataacagtctcatgaagaatttggcacagccattgtagaaaaagtgccttttcagagctcacagtatgcatgtactcatcttgcttttattatacctgtatatggaattgcaagctgtcccttcaggtaatgaaatttagacaagttggaacctgtataacagcaaatcaatactgaaattataggcaaagcctgtacttgtgcagactaacacataggatagaaagactttgtgatcaaaattcaacaaatcccacatttataggtatccaacatagagagaaaactatatatagtggtgtgtctttttatgtgtttgcgtttttctccttattcattcctgaaagtgtattttcttttaacagactcacaactcagctacaccccatatgcccacagtcaacacagtggaaaactgagttgtttatttgagcctcaagtcatccaaatacttcgttaaacgttgtagtaaaaggtctcccctgaattcaaggaggatgccctaagttttctgcatccttttgatagaggaaagtattaactaatgtcagactatctgttgttttattttcctttacagcactagattttgttaaggacattgataattttgaaagagaagctaagctaaggtgacaaatatatcttctgttggtcaatatctaaaattatgtattatttcttttttgactacaccttacagtggttagtttgcactttacgtaaaaaactgatgtctaccatcttccatctttgtaagcaccatccagcctaatagttgttggtttgaataatgccacaagctttgtccagaaaccaaaaacctgatttccaaagactagtctatgtagctgagcccttcattccataatcattaaactatggttaggacacagtatccagtctcccctcaaccttgtccaatcacagtctatgcagagatcatgtaactcgattaaaatctagaaccatagagacatttcccttccctggggcaaatgggaattgcacatgggggaaaatggtgtggataagcaaaaaacggaagtttccaaagtgcaacagaatattgataattttagtacatttcaacatacagtgagtgtaatgacggcattttcctactgcttccttagttgtgaagattttgttttttcttctgggttcactgccgggaaaagagcagaaaatgttttagagcctctgccagcagagggggcatttaccatttgtgcataaggtctctggcactgtgccctggggttctcttttctatatgtttctaacagtcacacacagcagtgtgactgtttacagatactttaccgtcttctctgattgaagcagggactggtttgccagcaacttttggttgtttttgtttttttgaagaccatgcaactaacagatgtttgttgttggctccatatctacattctttgaaagctggagaatcaaattgctgacattcagacaacactaattcccatatccagggagcctaatttgccgtccctgagatcctgattcctggtgttcacgggtttaaaaaccatttcagtgacacaatataagaatgggcttgggagatgcagcgctgtctccactaaagataatcacattttataaacatctgcgtcattactggtatgattcatctctaagctgtatacagctgtgtttccagtttcaattaacaatcccttaattgcatatccatctcatgttactaatttagttaatttattcataattaagagtattctgttttctaccaaggtttgtcgagctcagaacattataaagaaaaatattttaaggcagcatctccgagggattttgtttcttataatcacatcacagtaaaatgtcattcatgcgcccaaaggaagatgaattgctaagggatttttttttccagtaaaataagaagctttgggaagctgcagtgtgttgtgtttttaaaccaagttaaatgcgatgcattttgttcttttctttctccttccctgacatcctctcaaaaaaattatcattttatttgtattattgcttaagtatcacagcaaatccagtcaccagtgcaaataaaactgtcattaccctgtcaggtaatggtgtctcttaaaatctaagctataaagtctgtacattttagaggacattaagatcaagaatttttaaattgcctaagtctaagcaagtggagtacacccttgtggaaaatggaaggcagatgaaaacatgatgccaggcagtgaattcattttagtttgatcttttctacaaaaatacatatatccgtgcagcaagagtcttgcctgtgttagtacatgtgtctgtgtgtcattcaaagcagcaataacaaaaaattaagaccatttctcactttgtttattgttcaagaactcccacctatagccttgacctgtgtttgagcttaaaaaaaaaaaaagtcttataactgcccagtggtttggagattttacacaatagaaataataagccatcttttgcctcacatgaattctactaaaatcaaaactccataggatactttccaaagtaactggtgaaaggaaaagtgtggtagtataggtatgcatattatccccatcactttatttctgagctcttctattttttaaaaattttaatttgtatcttaaaagggcaaaacataagaagaggtaggagtattctaaatttcagtgacaacaaattcatttattttacaatttaaccattgcccgtcaacatttacttaaaatttcagcatgggaggttttaaacacttctagagtcccatcttaccccatttccacgatgcttttcttctccatgtgttgctgcagtttaatattgtctgcgtgttttaatatgttaaacgagttaaacatagagtaggaagttaaaactgttagcagctatatgtttcccaagattgatgaaaattcaggtaacactccaacctgttaaagatacctgcaatctggccaggtgcggtggcccatgcctataatcccagcactttgagaggccaaggcaggcagatcacctgaggccaggagttcgagaccagcttggccaacatggtgaaaccccgtctctactaaaaatacaaaaaacatttagccgggtgtggtggcatgcacccatagtcccagctactcgggaggctgaggtgggagaattgcttgaacccggagcctgggtgacagagtaagactctgtctcaaaaagaaaaagaaaaaaaaaaatatatatatatatatgtgtgtgtgtttatatatatatatatgtgtgtgtatatatacatatatatatgtgtatatatatatgtgtatatatatatatatatgtgtgtgtgtatatatatatatatatatgtgtgtgtgtgtgtatatatatatatagaaagagagagagagagagagagagagagtaagcagggaggggttgaagccagaaaagactagaaattatctaggccaaaccctttaatttatagattaggaaatagtttctggttgacttagctgagacgttctcatttgttaaaagcaagatcagaaatcagacacaattcaacgctcttcactacaccttgtttttctctttgtggaaaacaagacgtatcctgttcaaaaatttatgctgtttatctgaaagcccaaaatgcctgtttacatcatattttccattttgcaatagcagctcattttggggattattttctgatgaaatctctaggtttagttgtacttgaatatctttttatctgtacacactggaatatgcatataataattgatagaaatgtggattttaaaagtagagatgatcattattattttatgatcctttaagttaataaaattcacctagaataaaataaacaagtttaactaaagttctcgcattttcccagaaatcgtagactagaaactagtcttatttgcttattttattccaaagcttattttacctctattattttgtggttctataaaatatttctgtgtattcctccaaagaacctcttggaaaagaaagtaaacatcacatctgaaaaatagctgggcattttttcattatctctgcaaggggaggggacgtgaaaggcaaccccatatagaaactcaactccctgctttttacaatgaatgaagtttttccactgcactgtcagaatggtaattcttgctaactactcacctatttcacaacattaacagagttccaggattcatgctttaatattgcataatggtccatgttttgaacatgaggagtggcagcggagattacactttgattccttggatttcatgtggcactggatgggagcaaggcactgattttaagttgagataaaaaggagaagtcagtcaatgcctgcagccagacaggactcttgtaatagctagggagtatgcctcatttggatatgcatgactgccgggcaaggacactgccatgaatcgctaatggcagcagttgtatgacataagagagatgtgtatcagcaactcacaagttgactttgttacatgttatgaacacattcctgtgggcactcattcatagaagtgagaaatgtggacaccacagtgtcccaggcctttgttaccttatggcctgggaatatcttgctttgctggaacatgaagccacgtctggttataagaagaagtttgatctgggagcaaaattgcctgttcacgcatgtctttctcacttctttaaaactaacttgctataagggtgattaaaaaaaacagatgtcaggtgagagttttgctttgcatcaacttcctacttgtagaggtaataacataaaccttgcctggcaatcattatttgtcatccagctgagggtgtttactcttgagaaagaagtaatggacaaaattgacttggattctggttctatgtttcccattaattgactctggacatatacatgcaatttaatccatcttactaaaaacatgaccaactcacaggatgtaaattctattctatagaaagggctttccctcagtagttagtcaagggacggttcctaactcctgtctttattgagcttattttccaaaataaatgtattattttctactttgttcacagagcaaggcagcataaagaaattaagcaacaaaacaatagtgtatttttacccaactttctagaaaacacccatttttcttaagttttgatatttttttgccaacaggcagtcaaaaagaagataaataaaactgggttaagttggtaatgacacaataaataaatgagatgaagaaagaggcaataaatatgagtggataccaacaagaaacatgttcaagccctgaaaaaataatgagaaaaggtagaactattaataatacatcccgctctcgtatcacaccttgctccccagatacatcctatctgtcctggcaccatgttgatgctgttgttctgtaagctatgccaatgaacatgttggatgacctactccagctctacctcaagatttccaaataagaaaaggacccagggatctccttgctgaggtctttatccatttactcaggtcacaagtactaattaagcagctcttatgtgcaaaatgttattgcttcaggtcagtttttcctatactgctgttctataagagaggaagaaggtccctgccctcagaaagccctagaatacagatctagagatgggttcaacatctttgttatgcaattatttcattccaattgtaatgagtacttagaaaggacaaaagcagagtgctgagagagtataacagagggacttgacctggtgtagtaggcctggaaagtttcctggggaagtggtattttagacaaacaacacacacatacacccatgaatgtatacgtgtggagaatgtattctaagtaactatgatgaatgtatttcttactgtaggtcatggtcaaagtttgaaaactattgttctaactagtattataattccagggatagtagaggtcatgtgacctgtttagcacatgcctgccttaacagtatctagtaggccaggcaatgtggctcacacctgtaatcccagcactttgggaggccaaggcaggtggatcacttgaggccaggagtctgagaccagcctggccaccacggtgaaaccgtgtctctgctaaaaatacaaaaattagccaggtgtggtggtggtgcctgtagtcccatctactggggaggctgaggcaggagaattgcttgaacccgggaggcggaagttgccgtgagctgagatcatgccactgcactccggcctgggccacagagtgagactctctggaaaaaaacaaaaaacaaaaaaaaagaatgtctagtaaataagtcagtgccaagcaactacctgataactgttaccaccttagtcatcaccgaaggcagaaggtcttgcattcattggaggagagttaccaatctaagacatttgcatgaaaatgtgcacagagccctcacctgataatcaaagcatgttccaacacttctctttggataaaataagagttacatctcaatgaaatcacttgtggatcaagttctcatcctttcgtaaataaagagaggggcagcaagaaatggaagtgagcacatataagtgtgggaacctgtactttcctaacctataaagcattggatgtagtttttgctattggtgcgcatggagtcatgtggccttggagcagttaggtaccttccctgatgataggggagaaggcaaagaaattgatgatacatctctctcattgtcattccctagtatattacacttaaatctaactgccctattttgtgattgccttactgctgtggcttgaatatttgtgtctccccaaaattcatatgtggaaacctaattccatatatgatggtattaggaggtaggccccttgggaggtgattagatcatgagggcagagcccacatgaatgagattagaacccttataaaagagacccagagagctgctttgccctttttgccatgagaacacaagaaggtgctatctatgaacaagaaagcaggccttcaccaaacactgaatctgccagcgccttgatatcagacttcctagccttcagaattgtgagaaaaaaactttggttgtctataagccacccagtttatgatattttgttatagcattccaacggactaaaacattcattttccagaaaatctactccatttataagccagcattcttttttttttttttttaattttctacagatctctgcagaaacatgcagagtaataatagggccaggcacggtggctcacgcctgtaatcccagcactttgggaggccacagtgggtggatcacctgaggtcaggagttcgagaccagcctggccaacatggtggaaccccgtctctactaaaaatacaaaaaattagccgggcatggtggtgggtacctataatcctagctactcaggaggctgaggcaggagaatcacttgaactcaggaggcagaggttgcagtgagccaagatcccaccattgcactctagcctggacaagaatagtgaaactgtctccaaaaaaaaaaaaaagaagtgataatatatttgctgtatatattagttatagatagttatattgcagtactatcagaagctatgccacatattatttacgtatttcttaagatatagaaaacatccctcccctgcagtcattagtacttttgcattcaaacttcaaatgaaacaggactttagaaattataggcttggtgccatcctggccaacatggtgaaactcgtctctactaaaaatacaaaaattagctgggcgtggtggtgcacacccgtagtcccagctactcgggaggctgaggcaggagaatcacttgaacctgggaggaggaggttgcagtgagccgagatcgcgccactgcactccagcctggcgacagagcgagactccgtctcaaaaaaaaaagaaaaaaaagaaaaaaagaaaagaaaaaagaaattataggcttggtgatttctcaggcattaactcaagaaagcagcctttataccgattacctacattcacccagcacttaccccattaatttctaatgttgcttggaacaaatgaacattcctggaatgcaagctaaatgaaagagccccgaagaagaacagggcatttcctggttcctcatattgacaaatttaaaagcctgtgctataatatgggctcctgtttcctttcaagtttgtctttgaataagtggacagagtagctgaaagcagagtatttaaagctttgaaacgaccactttatttcagtctctgttcttgctgggaccactcttataaatgaggagattagaaaatcacctagaactatttaatcgttgtgcagaagaccctcttaccccaaatatttacttaccgctcattttattggcacactgcctcaaattccacctgctgtgaactgacctaagtgaatttaggtcacgtgcaactattaggttctttttgggaaataatggagaaccacagatgtgtttgaggtggatgaggaatggctacctcaagccgcagcttcatgcttcatgctgaagtcctccacaagtgcaatcatgtcgttaaccaacatttgttagaaggcaggcagaagtcagcttacagcctgttctacaatttttatgaagtgtaggattttaggcttaaattgacaccattgcaaatacagtattctcttacctttagatttggcatcaggtcacaagaattcttcctaagccaatggttggatacaaggccattggagaccagacgtaaaattaaaagcccaagcaacaggttttgctggattcttatatcctgtttatgcaatgttaggggatgtcattaaaatattttagttaatccatgtatcttgattgtcttaaattttactaatgagatcctatagggatattcattgcaatccactatttccctcagcaaaaacacatttgcgatatctattacatgcattacaaaatcctccaaggttcacagagatatatagtagtagcagtctctgggttttggcctttttcataagatgaaggctgtgctgtcctagaatatgaattcctaattaaaataaccatttgcctcaagcctctagagttgaaggttgcactaactgcacatataaaatatccaactatctatgttgagatatttaaaattaattacagatattgtaacaccattatttaacttaaattccattacaggtcctttgagtatgcaaaatatttctttgagatgtggtaacccctttaactgatcaggaaataaacctttattatcaagttgttatcccaccttgacaggcctaaagcgcagaccacatatcagaatcccctgggcagcttataaagctcctcatgcccaggctgcatctcagaccaattcaatctctgggggtgggctccaagcatcagcatttgttgaaaatccccaggattacaaagtgcggtgaagtttgcaaacccttgtaataagagaatgggaggagggatggctgtttgccaagcagaaccaggaatgaggaaggatattggtaaacaaaatttatccataattgacttttcatgaatcacagtcctactgagacccagccttgtctcatgagactttggctacgatgatgagtgagaaaaggactcctcctaatttaccagactcttgattagaagcaaatgaaattttggaaaagagacaagtcactttcaaaagaccccagcctgtacctgaccctacctctggactccatagtaatggcaggtagtggtcattcctggagtaactctgtatttcttaaaggaacatttgcataatgaacctacagcaatctggaagacgactggggtaaatagagaatttgttgattttagatggctgaatactatccgtgcagagcaattaaaaggacaactgtcagaatcaagtaagagaaaggaaataagagaagtctcatgttagtagaccttgtttgatcaatgtgttttcatcttgtatatgattaataaaataagtttgggagttaggatcaacctttgtttactcactggagaataacttgcatatagaatgaagctgggattgtccaggctggtttttttccatttggaagtttggatacaatacaaggaagcctgaattccaaactgtttctcttaaagagtgcctttctgagccgctattaaggaatgcttattgtttcgaaaatggtagcacagaagtgttataactagagtacaccttgtgcctgcaattaattacccagtgtcttcaaaaattcttgtcttttgctggtagaaaacctttgaaactatagttgtctgtggtattcactgcagcaccttagatataaagagagaaatttattttcagaggaatcttgagacagtttgtgtgtgtgtgtgcatgcctgcttacacatctattggttttccccaaggattgtagaaatcccattaaaattccagcttcttaaggagctactgaaactccagtttttcatattttcttttataatatttggatgcgtttaggtaaacttgcagcattttaattatgtctgtatcagatgagcggaagaaatgtaaaagggtttggggagagatttaattttagatagcggcgtaattaatagcatttggaaaaactagtggaactttaattaaatgtctctacattaatttagtcatttaattgaacatgtagtgggatagtccttacaatttttcacccttactctttgaggaaaaatgatttttgaataacaaagcatcagtatgactactttttattatttagctgtatgttcactacttggcactttgtttaatttttccccccatatgtttcgagctttttaaaacattaatttggcttgtcgcttttatcttaaaaactataaatctgggggccgggtgcagtggctcatgcctgtaatcccagcactttgggaggccgaggtgggtagatcatttgatgtcaggagttcaagaccagcctgaccaacatgacgaaaccctgtctctactgaatacaaaaaaaactagccgggtgtggtggtgcatgcctgtaatcccagctacttgggaggctgaggcaggagaattgctggaacccagggggctaaggttgcagtgagcagatattgcaccactgcactccagcctgggcaacagagtgaaactccatctcaaaaaataataataaaataaagaaataaagaaaactataaatctgggagaaaccgtatttggaaacattgagcaactgtttcttttcctttattttagactttaatattcactagagtcatgttgtaaagttttcaccttaatattgtaggctttttttttttttttactttgccaacttaactggcttttttaaagtggtgttatgctgcagcagtgtatctgaatttcagcagtgccttttacgtggctgctcacaatcttattaaactacatgaattatacatggagagaaatataatttggtaaatttggtgatgtttcaataaccatgcccaaggaggaatgttgtgttaaactgtcaatttgagaagtgttttgtggtgctaaccacagagtgaattcagttctacttcatttcacaaccctccataaatagtgccccctaaaagtggtgcctccttgcctgtactttgacccagatttttgtcatttttctagataagcatatacattgtgcacttattaatttttcaaatgacacaaaggtgagaatgggagtcaacacactgaaagatcaaaatcaagactcaaaataagattataacagactgggatactgtaccaaaataaaaaaattaaaataaaatttaacaagaacaagcaagatgtcctgcctttaagatttttaaagtcttttgtacaaatataggctgaggaacatctgactttgtggcgctttatatgaaaaacaaattgggattttaaataaccacaaggactgtattaatctccagtatgatctggtgtggcttactgtacgaggcaatacagtattagattgcattaatgaaattcacaaatgttccattaatctcttcactagttaaaccacatctgcagtcatattgacttatgagcatcacgtatgatgagaacactgaaaaatcataatacattgacagcagggcaaccaagattgtgaaaggtatagcgatggttatatgacaaatatttgaaagaatctagaatgttcagtaagaagataacatgaaaatacaggacagcttcttcatgcatctggggagggtgggtaaaggacacagcacacttaattaagtaagattgtagaagagaactatgggcaagtgttacagtggagcttactctgagtaaggaaaatgtaaacgttagagttgttattaagtggcatgggctgcttcacaaatttccatcattttttaatctgattcatctgctaataggacaaactgtaacaatagcttaaacaatagagaaatgtaggtctctctcatgtacaagcccagaactaggtagatcaggcctccttccgctattctgcttcactaagtccgaagtcctcctttaccttgtcctgccatggtggcctcaattctcgttgtcaccacatggtccaatatgtctgcttcagctccagccaacacatctgagttccagcccccagcaacatggaagaaggaaggaggcacagagagggcgtgtgccagcagtgttgtgagaaaatctttcagaaactgtcatgaaatgtatcccctgatagttccttcaccagaactttgtcccatgattatatttacatctatgtgaggctaagaaatatattctttccttcaggcatctacatacccaactgaaaattatgagttctattgccacaagaaaaaatggaaaatatatggggacaatcaacagtacttgcacaaagatgttttacagagaattactcttttacctgggaattttacaagataaactttaagatcctatcaactctctctctctctttttttttttttttttttttgagacaagagtctcgctctgtcacccaggctggaatgtagtggtgcgatctcggctcactgtaacctccacctcccgggttcaagtgattcttctgcctcagcctcccgagtagctgggactgcaggcgcccgccaccatgcctggctaatttttgtatttttagtagagacggggtttcaccgtgttggccaggctggtctcgaactcctgacctcaggtgactcgcccgcctcgacctccctaagtgctgggattgggattacaggcatgagccaccacgcccagccagatcatctctggaggcagggggatcacttgaggtcaggagtttgaggccagtccggccaacatgacgaaaccctgtctctactaaaagtacaaaaattagctgggtgtggtggcaggcaactgtagtcccagctactcgggaggctgaggcaggagaatagcttgaacccaggaggccaaggttacagtgagccgagatcgtgccactgcactccagcctgggtgacagtgagactctaactcaaaaaacaaacaaaaagagtctatgatcctataatttatagacaacatacaacctcctttctctacaaagagaattggttctcaagggctgtttggaaattcatttccttttaagtccaaaatgacatacaaaagtgaccaatatatacaatgtacacccttctacaataagttctcttttgttgccgtagtaatcgcatgtcttttcttaaaggaacacttttttgactcttttgtacttttgaacatagcggtgttaataataatatttataaaacattatgaaaatatgcacacaaaacacaacacaggctaagaaaacctaatggtggcctaaagtaagttctgatgtcctctgttggtggtattcttcattgccatgcttctgctgtgcctgggacctttattgctacctatgggaagttgtaagtagagaagtttctttactacagggatgtgaacaatcattgtaagtaaggaataatgaattcacataagttcacagagcatgtttttctgccctggtaatactgcatttctcactttgcatttaaagtacctacgcccttacacagaaaaagttatcggggttgggtgcagtggctcacgcctgtaatcccaacactttgggaggccgaagcagggggatcacttgaggtcaggagttcgagaccagcctgggcaacatggtgacaccctgtctctactgaaaaaaaaaaaaaaaaaaaaaaacacacacacagaaaaattagccaggtatggcggtacatgcctgtagtcccagctacttgggaggctgatgtggaagaatcgcttgaacctgagaggtggaggttgcagtgagccgagatcgcaccacttcactccagcctgagtgacagagtgagattccatctcataaatatataaatatatatatataattatcgattgattaatattattatatggtccccattactctaaactctcaaaatgtaatgtaggtcaaaatcagaaaaaggccatactgtctactccttcctctgtttcattccaactataagagaaagggagagggcaaaacaaagatgacaggaggccaaattgtacatagaattcatggaaattcttacccaacatgtaaaattatgatagtataaggaaaagtatactgcaaaaattaaacttctacattgtgaaatggagaacatttttacatctagctctattgcttctccctgtggagctgttctaagcacaaagttcccattacataatgaacaactccttaaatactgtgcaactatttctcactagaagcacgatgcagcaaactctgtttctcagtaaccatttatatcatacctagtggtaccgagttctataataaaagggtgatatgtgcatattttgtggtcatagagtgcaaagttgacatctacagtttaaagcattgcattgcatgaataaggtcaaaatttaaatacttttctatgatcatgttctttacattaaaggttaaagatgcatgccgctttaaaaatggtttaagggccggacacggtgactcacgtctataatcctggcactttgggaggctgaggtgggcagatcacccgaggtcagacgttcaagaccagcctggccaacatggcaaaaccctgtctctactaaaaaatacaaaaattagtcaggcatggtggcgggcgcctgtaatcccagctactcgggaggctgaggcaggacaatctctggaacccggaaggcagaggttgcagtgagcagagatcgtgtcactgccctccagcctgggcgatagagcaagactctatctatctcaaaaaaataaatgaataaaataaaataaaaatggtttaagaacttcaaaccatctggcaccagaaaacacctaaattgaattaaaaatctggaaatttaatttcacaacttgtcctttttcaagcctaccctaagttttgtttacttaatggggagaatctgttttatttgttcctatgtagaagactgctgattttatcatgattgtattagggcccaaggatatttaaaatatttcagtagctattacttatactttatatctgcattgcactttagagttgactgagcattttcaaagtattatcttaccaaattgccacaatagtcttgagaggctagtaaatcatgggagaagcccccatttccccactggaaagcagagaaaacccccattgtagtaaaggaggggttccctccagagctcttgtggttgtgttgaggaggaagtattaatgctgctgggcatgacttacaagaaataagtcaattcacttaagcaaaagtgctatgatcctgtataccatgtgagcagctctaggatggggtcacccagcattttggagcagacattagaacatctggagggagtaaacgcaaagaaaatgggctagatacctttccttggatgggaaaggataacattaagataccaagatcaaatgttcaaagagcacatatacaccagagaatactatgcagccataaaaaatgatgaattcatgtcctttgtagggacatggatgaagctggaaaccatcattctcagcaaactatcacaaggaccaaaaaccaaacaccccatgttctcactcataggtgggaattgaacaatgagaacacatggacaaaggaaggggaacatcacacaccggggaatgttttggggttgggggagtggggagggatagcattaggagatatacgtaacgctaaatgatgagttaatgggtgcagcacaccagcatggcacatgtatacatatgtaacaaacctgcacgttgtgcacatgtaccctaaaactttaagtataataataataaaattttttgtaaaagcattgtataataaaagtagtaagataaaccagtaaaaacaaaacaaaacaaaacaaaacaaaaaaaagttcaaagaggccgggtgcagtggctcacgcctgtaatcccagcactttgggaggccgaggcaggcggatcacttgaagtcaggacttcgagaccagcctggccaacacggtgaaacctcgtttccactaaaaatacaaaaattagctggatatgatggtgcgtacctgtaatcccagctacactgaggcatgagaatcacttaaacctgggaggcagaggttgcagtgagctgagattgcaccactgcactctaatgtgggcaacaaagcaagactctgtctcaaattaaaaaaaaaaaaagtttaaagaaaaataagttatttctccatgcttcaggagatatgtttcgcaggagaaagaggcttaatagagaaaacagatccctacaaacatttgtggtttttaaaactgccccattggttactaagtggataacatgagcgtgatgccagattcagtactctagtgagccatgcagctttgctgtgctctgcacctgatgagtgtggcctcacttcttataaatgcctgtcattgctaacaggggtccttgctgaaacaacagggctggactaatgctctagttcccttcctggaaaacctatcccaaagctgagatcctcatgatgccttctctcatatatgaatgattgcaggttacgctatcatcattaaatcgaaacattttagaccactttgcgtttgtttgtttgtttgtctcattatgtccagttttatcctgtttcataatttaataaatttttattgggtctgtcttctggttaaatgttgtgtgtataaaaaataaagtcaagagagagaacaggagttatggaactaatgacaaatccatccttcagctaaataaaattatactatggatgatttgagctgtacgttgagtgataatttttaaaaataagatagatcgggtgcggtggctcatgcctaaaatcccagcactttgagaggccgaggcggatggatcacgaggtcaggagttcgagaccatcctggctaacatggtgaaaccccatctctacttaaaaaaaaaaaaatacaaaaaattagccaggcgtggtggtgggtgcctgtagtcccagctactcgggaggctgaggcaggagaatggcgtgaacccgggaggtgaagctcgcagtgagccaagattgcaccactgcactccagcctgggcaacagagccagactctgtctcaaaaaaaaaaagaaaaaaaaaaagggccaagcatgctggctcacacctgtaatcccagcactttgagaggccgaggtgggtggatcacctgaggtcaggaattcgagaccagcctggccaacatagtgaaaccctgtctctactaaaaatacaaaaaattagctggacgtggtgacaggcacctgtaatcacagctactacggaggctgaggcaggagaattgcttgaacccaggaggcagaggttgcagtgagccgagattgtgccattgcactccagcctgggcaacaagaacgaaactctgtctcaaataaaatgaaataaaataataataaaaaataagataaagtatcacaagtaagatgtagttgaaacttcatgcatttttctatgatgcctatgatattcaaaagataactgaatttcatgagcagagttcaagaacttctgagtatacttttcattgatgacttaatgtaatggatttctatgatgatggcactatattcttttggtgtttatggtattaataaaaaattgtggtaaagcttgtggaaatgaacatgccttggattagggtgccttaaatgtgcctttgtaaatgcagctaggagactccaagtcacccttctagtctaactgctactcctttcttttacaaactacatgccaactaaactgaccttgatctgtttatgaaaaggcggtataggaacaggggctctgcaattggacagatccaattctaatcaatccactccattgatagatatataaccttgagtccttcctgtgcctcagtttcctcatctgtaaaatggaattaaaaaccaacttcgtgaggcttttggagaatgaaaatgacataactcaaagattattgggtatcagaaacaataatgttatctatcactgtctttactgttattattattattgtcattattattattttctctacctggaacaccaattccacaaactcttaatgtcaagaccatgctgtatcatggagccttccctgattcctccatatgaaaataattaattctcatattaataatattacttttctagttgtattttctttttttagcttttattttaggtttgacggtacatgtgaaggtttgttacataggtaaacacatgtcatggaggtttgttgtacacattattttatcacccagatattaagcccagtactcaatagttatcttttctgcctactcgtattttcattatccccaagtatactatacatatcttaaaattaggatccatgttgaaaaaacattgatatttcctatggcttctaacacagtacattgcacttagatattcagcaactctgtattgaatgtatgggtacaatctgctcttagtttctaatttggtattaatatgttcaagcctcaagagctcatgtaaatgatggtttgactatattgcccatcttttgttaagttgaaaagctgaaattcatgcactgtttgttagtgtagtaatttgtgacaacgtctagctattaagtcttttctaggtataaaacctttatatctgtcattgttcccctcttgtgtttttgctttaatatcgttgaaagcatctattattggaactttcacttctgaatagtacttttgagaacctgtatagaatttcagaggccttagaaaattgtcatagattgcttttagtatatggtttaccactgtggtctcttaacttttcaaaaagtatttccaaagggcacttacatccataagtggaaattgatttacatctattattgctgattgttcactattctgaacttcggctaaacaggtgatttaggcagaatttttttaaatattagattttttcctactttctaaatattttgtagctctttcttattaatttgagtcaacttatgctcgcttttttttgtcaattatagatggttgtcaggggtttggcaaatgtcatatgaaggtaattctttaaaagttgggatttttgaactgtttatttctactacttttgattttgctggaaattatcattctattaaagggacaaaagggtgctcagaaatatgcattgaaaaatttcttacagatttatcaaccattgccctcaggcactgatattcagccagtatgttccaatacatccatgtctttccattttaaaccttttaattctgttctaatttttcattgcctgtgcctgattgttctgtatccatctgatacgaatggttaagtacaacattttaaatatcactcttgcctatacatattatttttcttgtcagatgatataattgtagtcattacatgtttcttaagcacaactgaaatcttaatttaaatcaataagtcttgtttctgtggccattgtttcccagaactctccggatttctaagcatggtggttattcttccaggaatagtgccgagagtcttcagcagcatgcatttctctctaattgacattatttcacactctccattttccttactattgaaaactgtatttcattggtattttgccaaggatcctgctctgtttcataataatgttctgttcgcactctctgcactgacaaatacctattccatgcatcaattgcataaatggcaatttgaaagcatttaaccacagctggatatttttcattgattcttttcatctgaagatcattcattaggcttctccctcctgtttcttctcacatccatacctcctttcctcctatgtacatagtgtcttttgcattttctgtatttaagtgtaaattgctgactacagttatgcttttacctcattccatggtcataatgaaatcacaaatttaaaaatgtactactttttaaacctgttttctgacttgtccatctaaatgcaattttataattcttcgacattcagcctcctggtgaatgatttctgcaatctctccaagacatctgtgcagtgttatggattatattgattgcattttgtccatgttcaaatttgcagaatgtaacctacagaatatatattgactaataaagaaatgcatccacatggtggatggttgtaaagagaaaatatatattggtgtgcagcaggcgcccacacaaatgaaatctagaaaacagcagcttgccatgtcagagttgcaaatgaaggctgtggctacaaaacacagaaagtctggagtgtatgaaaggtttttcttccaaattcattcacacataaaaatgaaaaaattgaaaaatcatatatgtgcaccttaatttttatatcgcattggtgtttgggcatacgaccctgagattttcataccctcgatttttttaatataaccacctgagcgtttcttcccatggggttactttagaagatggggggtgtacacactacgtatgtatgtcaataaagaaatgaaggaataaaggaggaaagaagtgaagaaggctgggggtaggaagggagggagaaattcagtgattcattacttattcatcatcctaaactggcatataaaataatatgtttaaatcagtctaaaattttcattgtataatctctgaaataactagtccccactccctaaactgtttggtgtaaatatttatctatgtctaatcatttctatgcaaaatagccttatatatattttcattttcataagatcatctaagaatcaaaggaaaagctattttaggcaatgaacataggcagtgatttcaaaatagaatttgagaaatgcaaggatagatggaatcacaaaagatgatctcattcatggtgttttaaaccctacaaatagatttctgtttagttgacctcatttcaatagcttctcatttttttcagaagtgtatttgatgtgtatatttctaataaacttatttttctttttgtacccagtattaaggagcacagcatttatatccactgaacaaaggataactgaaaggaaactccttgatatccaacttggagtatttgtttctcgaatgaatatgagtttatataagtagtttttttcacatacataaaattagaatttgtttgtattattgatattatttcagaacagcggatttaacgtcatagatgatctagatgtgtcctttccttagaaatctttaaaatgaatcacatagtctagaaacagatccagatactacatgctctcatcagaaaggactttcttctcttcgtgtcaagttcagtgttggcaccgtatagacaaagcgtgttaaaatagcagggttcttgttctctgacacattacaagagaggcaagattataaaactgctatgtgtctcattataattcccattagtttcatttgcttcaaaacattcacttctgtgctttttgcaaaagctttcaaacttattttttgatgattctaaaagtaattcttctatgtcttttcctagtgatactagcattagttttcttttccaattgtactaggaggcatgagagattatcgatgccctattttcttgtctaaataggcaacccaaataatcatagtgacctgttcatttatattatctttatttcttgcctcatacttcttcatatttcttcatttcccatgtttccttattctttggagccagaaacgatcacgttaatcactctttccattagttttctcctatacattttctgatctttctctgagccagttaagagtcattcagccatttgataatggacactagtttactttgaccttgcaaacacaaataccctgtttgatctttatttgctgagagcagtaagacagaagaattacaataaactttttagcacccttctgttcaattctttttcagaaatcgttccctcaaaaagcctattctaggctctttcttttggcagtttcctagaattttcctttgcttttcaccaactggaacattatcactagaagtaaactaagggaccatctaattcaacaccctcgttttgtactttaggatactgaagccaagagaagctaatttttttgcctgccataacacaactagttagtgaagcagccaaaactataagggatcttgccaccataagctttatcggcccatccgtttatctcctcaaagcagccctatacctgatttccttatttctgttctctaagtaagccaagctcagaccttagagtgaccttcccctaatccaccctgcctgacatccaataaactgacaaatccagttgattatgaagctacagtgtttttcaaaccataccataattgtctaggctgttgccatgctctacacaccagttttcttattccagtccctccctgccccagtcccagttcactctactcagcctctctactgcaatggataaaatcacagtttccagattcacaaagctcacagctctgccactttctagccttgtatttgtgtttcagttgctgctgaaactctctaagcctattttccatctataaaatggaaaccaacccagaggctcgttgtattacagagatattgcatgaaaagcatttagcgcagtgtctggcccataagaagtcctcagtaaatagtagtcttggggaagcagtagggtgttgtagtaagagagcagagcaggggacagcaaactacaggtctcagtacaaattcaacatggggcctgggttttttttaatagcaggggagctaaaaacagtttacttgttttaataagttgtacgaaacccaaagaagaatatgtaacggagatttatgtgttcctcaaagccagaaatatttactttctggccctttacagagaactttcattaattcctgttgacagctgtcagggtatgaatcctctctaccacttagaaactgtgtaaccttgggcaaatgttttaacctctccaaggtttggtttccctgactgtgaatagtacctatgttacagggttgttatgagaattaaatgagatcatttatatcaggtgcttagctcactagctgaaataggatttaataaatgttagctgacatggttacgtctactcattgttgcagataaatagcctctaagtgcagctttaatagtgattgtttcttaaaatttttgaacaaagtttttctatttcttatccaattaaataaatattccacattctggcattcaatatttctaacgacatcaagcaactctaaaatcattgaatgttttaaagcaacaggaaaccttagaaataactcatctaaactcatatcatagatatggaaactaagggccaataaaaccaaggcttctaggacctgaaatcagatcctctctttttaggtagtgtgatcttcatcgtgcttctgccatgcaatctcagaatttaaagggatttaagaatcattcattttcttcctaaggcaggattcgaccctataaaatccctgtcagtttggtcattcaaacccagtttgagtacagtcattgatgataaatcacccttttcccagggagcagttctggttgtttcaaagtctttataataaatgaaaattggctttcctgaaatctctatatattgatctattcctgcccactggagccaaagagaaacgtcacttctctacatctgtaaaatactcgttgtcaattttcgtatcttctctaagcatcctcgtttcaagctgatgtgaactagttgggtttttgattgttttcattgtcctgctaagtcgaaaagctaagaaaagcttggctctttcatcactgttatatatcccactgtgtaacagaacttgagttcagggtatacactctaaataactgcttttgtaaaagtattcaattatattgatttttttcgttccctctgttgttcctcataattaccctcagtcaagactttcatcttcgtctttatcttcctctgcaagaattaacagtggtcccttttgtgaacttcaaatatctgagactggtctcagttaatttaggaagtttattttgccaaggttgagaatatgcacccatgaaacagcctcaggaggttctaacgacatgtgcccaaggtgtttggggcacagcttggttttatatatatttagggagacatgagacatcaaccaatatatgtaagatgtacatttgttccatccagaagggtgggacaacttgaagcaaggaggggcttccaggtcacaggtaggtgagagataaatggttgcattcttttgagtatctgattcgcctttccaaaggaggcaatcagataagcatctatctcagtgagcagagggatgactttgaatagaatgggagacaggtttgccctaagcagttcccagcttgacttttccctttagtttggtgattttgaggccccaagatttattttcctttcacactttcaatataagctatccagaactgatgataatattccagatatggcccaaccaatggaaatgattgtgtttcctacataccatatcacaatcaaacctgttttgcaccttgcatttactttctttattaatgatgtcattgcaatttagaaaatttggggccacatttacttcttcctctctattatcttcagtttttatttggtcactaaattctgtttgctgactcttatatctaaaaataaaaacactcaaatccagctattcctctctaactactctgcccttccctcagtcctttctcagtgactattaatgatttggccttctaatgattagcctccctgtccccagacttttatccatctttatcactatggctagttatcttgctaaacaacagatctaatcctagtaccccattatattaaaaaaatcttctatagctacagctttctctccctccaggtcagtatccatagcctgtcaagatgtggctttgataaaggacagaaggcagggaaattctgggcagaagagggcaggtccccattgaggacccaccctcaagccaaaaagcctggaaccatggcccaaagtgagaacttacatccctgttttccctcttgaagggtgccttttccaaaaccatccattaccccccacccaccccccaacctgtgcctataaaaaccccagagctcagctggcagaaggaggagaagcagatggatgtcagaaactacagttggacatcaaagagaagcggcttgactttagagggacagtttgacagcatagctttggagaggagtccagctgtggatggtcagactccaggggaagattaccttcccactccatccccttttcagctccccttcccactgagagccactttcattggcaataaaatcccccatatttaccatcttcaatttgttcatgtgacctcattcctcctggatgctggacaagaacttgggtgccatgcgtgtgggtgaaaaaggctgtcacactgaccctccactgagctgttaacacttaagccatctgtgaatggcaaagctaaaagggcgctgtaacacttcctcatgggcaccctcccctagaggctgctgcagggcccgtacggtgttcactcttgccagcactcaaaaatgctggccccagctgctgcacctgctcacctgtgctcccccttccatgaggggtggaccagcgagtgagtggagtttgctcccctccagttcccacccacgaagggatcagggaaatatcctccttcagctccagtgaggcacagtggtatacacctatagtcccaactactgaagaggctgaggtgggaggatctcttgaacccagaagtttgaggctgtaggcactgtggttgtacctgtgaatagccactgccctccagccttggcaacatagcaagatctcatctctaaaaaagaaaaaatatatatgatgtggctccaattcactgatctagcctcttaactgaattccttcctcctggctgggcacagtggcttatgcctgtaatcctagcactttgagaggccaagacaggagaattgcttgagcccaggagttcaagaccagcctgggaaacatagtgagacttcatatctacaacacattttttcaaaaagaattttttcctccctgctccccaccctacccccttgcaaccttatttactcttcggcctctggccctctcgctatgtctttctcagcttcatgcctttgaaaatactctttctatgcctggaaagcccttataaacctggaaattcctattcttattcaactctgagccagtccattttagtggcttagttcagaggctctagatttaaattgcaattctgtcagattctgtctgctttgccaacctcaatcaagttatgtactatgcctcagtttcctcatcagtagaatgaaaataatacagtagtgcttttttcatagggttgtagtgaggattaaatgagatgaagcgtataatcctcatgtacataacacagtacatactatatgtgttgcacatagtaagtgctcagttctttttctttgcattattcttagcacataagtcaagttacatttgctctcccttacgcaaggtcaattgttcttttttatgtgtttacccgttactttgttcatgcatttgttataaccactgccatcataaagcaacttgctatctttgttcataaaacaaatcccagattcactgagctcaaagtgagagaaggaaactttgcattatgtgcagttcctatgcttttctccaaatttcacatctccgttggggatctctcactagttatccttgccatacccccacaccagccttacaattttgcattatgtttcctacatcatgattctaaacggtcctcctgttcgctttctctccatcccatatcgttgcagatagctatttcctctttttaagacagaaacacatttgcattttgcctaagctacatttgtaaattttacagtattttcgaaagacacaatggaatctaggaaagatgcaacagataaagagattaactggccaatttttgagagcaccatccgtaaagtccacgaacaagtgaggcttccttgtcggagaaagcaattcagtcaccataaatgatcattcaagcctgatctcattccctcttgaaactggaaattgaaagcttgttcctctgacagttgtgttgtcagtggatatgcccagtgtgcaaaggactggacaaagggcaaaagtacacatatcccatctggaattctgagtcatccctgagacatcattttggatttgtctactgagatgaaattaaaacatgagtaatcaagcccacacttcttccccctcaaactcatctctttggtatcatcaagaaaatcaaatgctaatagccattgacctcctaattctagtgctcttagctatgataaaacagtcattaacttaatctaaatgttgcaaataaaggagccccatcaaagctgaagccccaaaattatacaaatgagttaactgggaaggcatgggggaaacaacagttttcataagacacactctaaatctagtttattctcttaggaagacttttctcatcaatagagagccacataaagatgccttacctgcctttcacggggactatatcaattggctgtactgtcactcactccaaaactctcaaaatgcctaacacagattcttgattttattgattgcattagatgttacgttttctaaattttcagcaccctggaggtcacctcaggaaatcatgcagtttttgaatgattttccttagaaatacacgtgtagctatacatatgcccatgcgttatttaatcagttagtgaaaggaggaaaacagcatttctattattgacctttctcaatctctgaggagactgtatgtcttgcctacagtccaggattgaaagcaaaagaaaaaggcactgacaaaatagcattttattttaatagcacattatggagagacaaaaaaaaaaaaaaaaaaaaaaaaaccctgggatttcctttgtctaagtagaattgacgtatgggtgagatcagtctctattttactcagtacaagtgcacacatatttatgtacacacatataattgtcatctttgggccgggcgcggtggctcacgcctgtaatcccagcactttgggaggccgaggcgggcggatcacgaggtcaggagatggagaccatcctggctaacacggtgaaaccccgtctctactaaaaatacaaaaaattagccgggcgtggttgcgggcgcctgtagtcccagctactcaggaggctgaggcaggagaatggcgtgaacccgggaggcggagcttgcagtgagccgagatcgcgccactgcactccagcctgggccacagagcgagactccgtctcaaaaaaaaaaaaaaaaaattgtcatctttggaagctaagggccctgtatcagagtatcagaatatacctatatccaggatgcaatgttctccagttttgcattaacatcagctacaaggttcactgccatctaagactaatcaacagtaatagctaaaggacaaaggtcagttcctgagagatatgcctaaattcatctggctatatcttctgttcctcccaaaccctaaccccataaattcttcattgtttagaaggattcatattttttgtttgtttttcatattcccattttattggctggggttagaattgcaatggcagcaaaaaacacagaagctatctacagtggcttaaataaatagagttttatttatctccaatattaagatgtctggaaataaggtgctttgggcccaacagtatcaggactggcatctgtatattttttattgacttttcctcatgcaatatagcagccaccattatttcacagggtgaaaaagagaaggcaaaaagggtgtactatctgagtcttatcatttttataaagccaaaaatttcccagaaaccttttttgaaagacttctacttgtatatcattgtgtagaactgtgtcacatgacagccaccaacaaaaagatggctagggagaagtggttttcaacaggtattgaagtagctaaccggcagtgtctgccggtcttcagttataaacaccagcagctaactctggctaattcaagtcagggaaaacaaaggggatggggtaggggctctttatttaaaagatactcatagaaatgaacgaagtaatttgaaaactaggtctcagaataggacatgaagtataagagttctaaaatctcaaaagcaggaacacatgcatcttctttttaagtgttgtctttgaaatactaagctccaaagtctttccaaccttgtattattttcttcctttgtcagcttcctgagtggcagagtctgagtaacctatggggtctttgaactctttaggggaattgaggaaggcaaaaaggtaccatgattggcagctctactagagtcacaagaaatatggggaaagcgattcctcaaaggaaaaacaaaaacagaaacaacaaccaggcagttagtagaaggatgaaatactggacccacaaagacaacatatgtcttctcaccacacttggtctctctctctctctctctctctcacccttctctctctctcatagtaatgaaactaaagctgcaaaactaaggcctagctattcattgtgatccttatgagatcataaaaaaaatctgtatttaagtggagaaaaataaatggaatatcaactttaaaaaattttttttgagacagagtctcgctccgtggcccagactggagtccaatggcatgatctcagctcactgcaacctctggctcccgggttcaagcaattctcctgcctcagcctcctgagtagctgggactacaggcacgtgccaccacacccagctaatttttgtattttcagtagagacagagtttcaccatgttggccaggctgttccgaaactcctgacctcaggtgatccacccacctcgacctcccaaagtgctgggattacaggcacgagccactgcacccagctggaatatcgatttaattgtaagagaaaaatgcactagtttaaaaatgtgtcctctttatcctcaggttttaaaaatatttttaaggtagtttagaaaaactgaagtgattatttgataaataaatttcaaatgctatcaatggaacaagaatggatattagatatcctgctaacaaggatcatatttttacaagttgtttctccaaagagaacagagctacagctgagattctggtgcgcataaacctttccatcagagctgtagtcacctaacaattcttatatcacaatcttcatatctcaatcccttttccaaataacttcatctttcttaagttgcatacaaatgttataatctaatatttttgagatggatatcatgtgtcataaaaagaaagccattgtaatattaccaataccaagtattagcaaatattgacatagctttagaataaaaataaacagagctcaggttctggctctgccatagctagctagatttatcttaagacttcagtttcctcatatacaaaatgttgatagtatcatcatcttgtaagccttgttgtaaagagcaatttagctaacagtaacagtgtttaacatgcataaagtgaagactcctttctgggctgataagaacgctagtttattcatttgcttatttctatatttttaagcttagagtctgaaaattttcagagtctgggagtcaacgtgtggggtgtgaattggaacttcaccacttactaacaactcccttttgtagtgcttccatttatttatctgttcaataggagtaataatagcactcgctcaaagagttgtctgaggattagatgagacaatgcttgcaaaatgcaaagtggagcacctggtgtatagttggtattcaataatttctagttgttgatatgatgatgacgatgatgatgtattctcttgatatgtgaatgctcatcacaccatcctatggaatatttgattttaagaaaaagttgggtttgttttttttttttgtttttttttttttttgagatggagtctcactctgtcgcccaggccagagtgcagtggcgcaatctcggctcactgcaacctctgtctcctgggtttaagcaattcccctgcctcagcctccagagtagctgggactacaggcgtccgccaccatgcccggctaatttttgtatttttagtggagaccgggtttcaccatatttggccaggctggtctcgaactcctgatcttgtgatccacctgcctcggcctcccaaagtgctgggatgacaggcatgagccaccatgcccagccaagaaaaaatattttaaacaagttaagatcatttactatactgtgccctaagatgaggtgaacatgtagatcatgagatctaattgattttagatgcagttcagttttttaaaagaatgacctgctttccatattaaaatttcaaaacaatgatatgtggagatgatgacagaatatggctgaatgaggtaccttgttatcctcaaccttttggctcagagacctcttccttgctggaaactttcctaaccttttaatgatttattaacattttgcatgcactctttatacctttcattaatgactagttcactgcaaatttttctttgctttatttcctattcttggtgtgacattcattctctatctgtttctatggaagcttttgtgatgcctcagagagaaagaattctgagtctttgaaataatgaaaacattactaaaccataaaacctagatttcaggagcctaatagaggattagagctttattacgtacagccatcttacagtttagccttcaagtctcaattgtggaatgatcttttgtcctttctctccagtgtgcatgtgtgcatacacatatagacacagttcgcgcttcagtcatataaatgggaagccacaaagcttcctagagtacccagatgcagaattagaagacccaatcttgacaccagggtcaggggatctgtggtttggggggacttgtgctggctatattgttgtcacagcaggaacagtttgtgtcggtatagaggctttaacttctagtaaagggatatataatgaaaatgtaagcaaccatcgtttatttttctcacataataggaatttaagagaaagatatacccaaaattggtttattagctcaacagtttcattcagaatccaatgtctttccatctttgcatttgctatccttagcctttggctttggtctttggaattgtcacgcgatggttataaaatggctgccacactccaggaattgcatcatgacagtgtgaatggaaaataaaggaagagtggcagttcttgtcatgtttcagaagcaacagcatgtctccctaacatctctttggccagaactaggtcaagtagctgcatctacctgcaagggaaactaagaaattgactatcagtgctttttaaacttttttttgtgtgtgtggaaatagataatcactagagaaaaaagggagagtggaatggttgttgatgaggcaaccaacagtgtctaccactctatttataaaccttttcttgatttttcctactaaatgtgtggccgttttttttgcttgctttttgttttttgtttttgagatggagcctcactctctcccccaggctggagtgcagtggcgtgatctcggctcactgcaacctccgcctcccaggttcaagcaattctcctgcctcagcctcctgagtagctgggattacaggtgtgtgccaccacgcccagctaatttttgtatttttaggagacatggggtttcaccatgttgatcatgctggtctcgaactccagacctcgtgatccgcccatctcagcctcccaaagtgctgggattacaggtgtgagtcaccgcacccagccaatgtgtagccttttagttcaaggacctttcattataaatcttcatagtccaaacacccggcatattgtctggcacaaaataggaagaaatatttttggacgtgccaaggaatttgcaagacagtgagacaaatagccagtaaaaatgttagcattaatatattattaaaaatagtgagaaatgctccaggcgcagtggctcatgcctgtaatcccagcactttgggaccccgaggcgggcggatcacttgaggtcaggagttcaagaccagcctgaccaacatggtgaaaccctgtctgtacttccagctacttaagaggctgaggccggagaattgctggaacccaagaggcggaggttgcagtgagccgagatcacgtcactgtgctccagcctgggtgatagggcaagactctgtctcaaaaaaataaaaataaaataaaaagaaaaatagtgagaaatgttatgaagacaaagaataggctactttggaagaataatagtgggaacttcttcatagtctaggaaggcctctctgaaaaggatatatttaagctaaaatctgaaggttaggtcagtcatatgaacagggaggggaatggaataatattttcaagacaatgacctaaaaggaggcaagtatggctaggagctaatgactgagggggtgagtggtacaggacaaggctggagagtttattttatgggtaagcagagaaataatataatctgacgtacctgtgaaagtacacctgagctgatgtacctgcaaaacatcatacaatctgatggacctgctgtataaatgagagattgaatgtggcaagagtagaagcaaagaggccaggtaagaggcatttgcagttgtcttgatgaaagaaaatgactactgggagtaagatggcggcaatggaaatagagagaaatgaacagatttgagatgtattttcgagacaaaatctgtatgacttggtgatggattagatgtcaggcatgagggattgaggatgactcccaagttttttttgtttgatcaacttgttgtactgtttgctgaggtgataaagatggaggaggaagcagatttggaaaagatcaacagttcagttttagacatgttcagtttgaaatgtgtgtgatatgtccaagtgcagaagtcaaattcaattatagctcaaaggagagacccgagctagaagcgtaaatgagaaaaatattgatacaaaatggaatttagagcatccagaatggaaatcacttagcatgtaaagagggaagggaagatggcctaggaccaaaccttgataaacttcaagaaaaagaagtcaagcagaggtaggagaagagaagtcagtcaaaaatcaaaagaatatgacatctcagaattcaaggatgtgaataaatgtgtaagtgatggatggctttcggtctgggctttttgttttttttttccattttaagttccaactttgctacaatccggctacgaatcccacaccctcccaaattatctgaggatgttaattgatacttgatcagaaagcagtgatttttaaaatcatatacttctaaattatctgagatatgaagcaatgagatagggaagtggctgaaatatgtttctctggctcagctgtcatgagggcttgctctagaatggcactcaagcacatgtttatccactgagctctatatcatttattccattagctgaagaaggaatctctcacactctaacttcagttctgttggacatgggaataaaagttagatgtatacagactaaactaaacagatggtagaaaaacaaaggattcttaaagtatattggagaaatgcatttctatggtcaattttcttgaatatcctaagatcaggtttcatgtatataattctttacatttcacaaagcacctttagatgtgtctattccatttaaccctcatcctaactgtgtgaagtagggcacagaagtgtagaaatgattttttaaaactcactaagctaatcaatggataatctgtgattataatagaatctgagtttcggcatctttatcttattccttactgcactatatctggaatggtaaatattgttcatctcacaagcaagctcttattgactgatatcagctgcctagagtggtttattgtaaaagagcataaagcaaattggggaagactacaatacagtgccataggctgattagtaatttctaccattggtattaaatgagaaaataatggtacaagtgctttacatttgtctgccattcctaaactaaggcacctcctgttatttataaggaagaatattctgagaagtttaaaagtctcttgttaaatcatttgatgacgttggataaaatggcttaaaataagaatatgcctgttgcacaaataatctacactcccccaagataatgaataagtcagctggagcatctcaagtttcaatatgtagaggatcaaaatgaaatagtcataaaaccccttgcagacatttcttgggcaggcaaactaatttcctagtaaaagaagttggaagttggacaaattgtatatgggaactttctatactacttttgcaaattttctgtaagtttaacttttcctaataggatgctgagattcagctcttccaatggtctcaaatgttttttggttttgttttgttttgttttttgagacggagtctcactctgtcacccaggctggagtgcagtggcgtgatcttggctcactgcaacctccacctcacgggttcaagcaattctcctgcctcagcctcccaagcagctgggattacaagtgcctgccaccatgcctggctaatttttgtatttttagtagagacgggattttgccatgttggtcaggctggtctcaaactcctgacctcaggtgatccgcccaccttggcctcctaaagtgctgggattacaggcatgagccaccgctcctggcctcatttaaccattttgactttcactttttctgtcttcaaaatgaggtattgagctaggtaaacttaatgtcttttttcgctttaattatctaataattctgtgattctcaacttggtgtgttaaaccagattacacctaagaaaccctgaagactttttagctaggagtttaaatattcacttagtcattcaattaatatctattgtgggtctgttatatgccaggcgccattttaggtattgataataaagcagcaaacaagacaaaacccctgccctcaggagagcttacattcttgtaaagaagacagatgataggccgggcgtggtggctcactcctgtaatctcagcactttgggaggccaaggcgggtggatcacgaggtcaggagatcgagaccgtcctggctaacatggtgaaactccgtctctactaaaaatacaaaaaaaaaattagccgggcttggtggtgggcacctgtagtcccagctactcgggaggctgaggcaggagaatggcatgaacctgggagctggagattgcagtgagccgagatcgtgccactgcactccagcctgggtgactgagcaagattccatctcaaaaaaaaaaaaaaccgaaaaacaaagaagaaagatgataaacaagtacacaattatcatataacaattttaaatagtgacagcatgttgaaataaataaagcaaggaagacgctagagagttgttcatggaaggaattgtcattttatataaggtgatcagggaaggttccactgaggaggtgacatttgaggaaagacctgaaagaagtggggagggagacccgaaagttcatgaggaattgtgtcccaaacagggcaacacataaaaagtccttgaggcaagactaagctgattatataacatttaaaagaattaggccaggtgtggtggctcacacctgtaatcccagcacttttggaggccaaggcgggtggatcacctgaggtcaggagttcaagaccagcctggccaacatggcaaaaccgcgtctctactaaaaatacaaaacttagccaggcatagtggtgcatgcccatagtcccggctacttgggaggctgaggcaggagagtcacatgaacccaggaggcagaggatgcagtgagccaagattgcaccactgtactccagcctgggtgacagagcgagactctgtctcaaacaaaaaaaaaaagaattaatttacatatcatgagatcatctagtctaacacccttactagacaagttcaaaaaggttaagacttggccaagatgacacagctatttaatgtgatatctgggttagaattcacctcatctgaattcctctcaaattgtgctctttgaggtcaatgtgccttttaaaaaatgacagaaagcatggctgtagatttcagatcataccaaatttgatggaacaatgaccatttttagcttcctatagagtctaagacttgaacttgccaagggagtcacagctggatttgtaagcatcaaatccacaaatgtacttaatgtcaaccaaggattttgtgtcacctgtaatgctcccccaggaagcccccaagtccactagtcctaatcactgtgtttggcttcataacctgttggcccaaacattacgcaaaaaagagcaatattcccaaggtggtcatgttagttgtggtgagatgtcaaccataagtagatctgaccgaggaaatgccttaaggaagcagctcaggaacacctgagtatatgtgtctagaatgaagcctattaaaaaaactactgcagagctaaagacagctgaaagccattatgacagtcacaactacttgatagattgaaaccaaagagttcctttgtgattagatagatcaggactctaaatcatgtttttacttcatgtgttcattcattcatcatacagtcagtgattcagtaaacaatattgagcatccattatgtgccaagcactgtgttaaattctggaaacacagagatggattagacccctgtccccagggagcataaagactagcagagttagacctccctcccatatgaagaaattaaatgaggtaaggcattaaaagtgctatgattacataatacagaacccaaaggggaaggcattttctgaaaaacagaaaactgaaaataccagcttttcagcctcacacagacataggaaaaccaacccccatcaacatcatctcttcttttttttttattattactatagtttaagttctagggtacatgtgcacaacgtgcaggtttgttacatatgtatacatgtgccatgttggtgtgctgcacccattaactcgtcatttacattaggtatatctcctaatgctatccctcctccctcccctcaccccaaaacagtccctggtgtgtgatgttctccttcctgtgtccatgtgttctcattgttcaattcccacttatgagtgagaacatgcaatgtttggttttctgtccttgtgatagtttgctgagaatgatggtttccagcttcatccatgtccctacaaaggatatgaattcatccttttttatggctgcatagtattccatggtgtatatgtgccacattttcttaatccagtctatcattgatggacatttgggttggttccaaatctttgctattgtgaacagtgccgcaataaacatacgtgtgcatgtgtcttcatagcagcatgatttataatcctttgggtatatacccagtaatgggatggctgggtcaaatggtatttctagttctagatccttgaggaattgccacactgtcttccacaatggttgaactagtttacagtcccaccaacagtgtaaaagtgctatttctccacatcctctctggcatctgttgtttcctgacttttgaatgatagccattctaactggtgtgagatggtacctcattgtggttttgatttgcatttctctgaacatcatctcttaatataaaaagcataatgtgctgatttcacattgcatgcctgtatcaaaacatctcatatgctctataaatatatacgcttaatgtgtacctacaaaaattataagaattttttttaaagcaacaataaatatcttcattagtcaaccaaattaaatctattaatatatccatgtttgtgaacaggatggccacagaaccctgtggatgcttaccacttaaacatttcctgaaacaaatatgtttccaaaacatcttgcctgtctaatctgacaactgcagacatcctaactaggctctgaaggtgctctccatagcactgatgttattgattcagttgttaacagcgcaggcataaatgactgatgataactctctaaacgtcccttcctactgccgttgaaatggctctgggctttatccaagcagggctgctaaatgaatagtagatgtaccagcagaggagaaattggtcctgaggtgaattaactctcctgaggtagatttgtttgtgcttccaacaacctgtacgttaaaccttgtgaaccttcatgtaggaattttgaggagaaatgggcaatttttggaaagcctaatgttttatcagccgctttttcttctcattgagacctgtgtattctcaagggactttggaagtttgccattttaagaacagacttgatgagaattatttgaagtcctccacgtttccatttatcagttttcctaatacagacatcctacgcacatcgttgaaagaatgttctttttgcctcacaggtagatcacaaaagtgggcccataatcattgggtagagggtttctcagctctgagttaaattgcagctgggtattgtttttctgtaataggatcttctctgagtgaatggtgaaacatgcccatttttgaggtcatgagagcagagctttccacatcatggacagaaaagggcaaccggccatggtttcagttatacagggagaggaaacaataggttttgtctctgctttgctattgcttcaacagcagcatactgttggacactcagacattagggcacaatttagacttgtttcacagctgtcatttctttcctcaaaaacaacaaacctgcatgggggaaatgagtctacatttcagggtttttcaagaattgataacataacatgtacttcaccatgaatttatattccacaggtccctgttctcttctctggtcatcagagtacaaaatcacaaccaaaaagcaagaattgatatctatgaagctaaagtagtagtagtagtagtagtagtagtagtagtagtagtagtagtagtagtagtgaagcaggatattaccctgatcccctcgcgggcgggaactggactgcatagccgcttcggtgctggcaggggcagactccactggctcagtctcactgagttccacccctcatgggagaggaagcacaggtgagtgggtacaggagccagggtgagtgcttttgggcgccagcaggaacaaaactctgtgtgggccccatggcagtgtctaggagggtgcccgcgacccttgaatccccagaaggagtgttacagggcccttttatctttgccatctgcagatggcttaagtgttaacagctcagtggagggtcagtgtgacagccttctgtactcgcacttgtggcacctcagatcttgcccattttccaggaggaatgaggtcacacaaactaattggagatggtaaatgcgggggattttattgctgatgaaagtggctctcagcaggaaaaggagctgaaaaggggacagagcaggaaggtaatcttcacctcgagtccagctgtccgcaatcagactcctctctgaagctatgctgccaggctgtccctcggaagtcaagccacttctctccaatgcacaaccatagtttccaacatccagctgcttctcctctgtgccggctgagcctgggatttttacaggcacaggatggagggcagggtgggctatgggtggttttggaaaaggcaacatttgagcaggaaaacagggatgtaagttctcactttgggccacagttccaggcttttaggcttaagggtggggcccttgccagagacccgccctcttctgtccagaatttccctgcctcctgtccctatcagtagtaatagtagtagtagtagcagcagcaacagaagtaatactaactactacataccaagcattatctacgtacttcatatctattcaccaacctaattgttacaactttcactcgcgtccgtgtgaagagaccaccaaacagtctttgtgtgagcaataaagctttgtaatcacctgggcgcaggcgagctgagtccgaaaagagtcagcgaagggagataggggtagggccgttctataagatttgggtaggttaaggaaaattacagtcaaaggggggttgtcctctggtgggcaggagtggggatcacaaggtgctcagtgggggagcttttgagccaggaagagccaggagaaggaatttcacaaggtaatgtcatcagttaaggcaaggaccggccattttcacttcttttgtggtggaatgtcatcagttaaggcaggaacaggccatttaaatttcacttcttttgtgatttttcagttacttcaggccatctggatgtatatgtgtaggtcacaggggatatgatggcttagcttgggctcagaggcctgacattcctgtcttcttatattaataagaaaaataaaacaaaatagtgttgaagtgttggggcggcgaaaattttcggggtggtgtggagagataatgggtgatgtttctcagggctgcttcgaggtggatcaggggtggcgtgggaacctagagtgggagggattaagctgaaggaagattttgtggtaaggggtgatattgtggggttgttagaagaaacatttgtcatgtagaattattggtgatggcctggatacggttttgtatgaattgaaaaactaaacggaataagagaaggagaaaaacaggtattaaaggacgaagaattgggaggacctaggacgtctaattagagagtgcctaaggaggttcagcatagccttgccagcaaagattatttactttaagagttaagagtggtggtttggggatagcaccaagagatatcagctgtgatggcttggagaaacagtgtaaaccagcagtgtaaacaagagcagggcatttatgactagttgagactggtgaataggagtatgactagacagaagataggagggatgacaagttttttggggtgcagtctaagttggtctggtgtctggaatgagactggggcctaataaaaaggagcgtccatacaggagcttaaatgggctgtaccttgtagcattctgaggacaggcctgaattctgagaagggcaagtggtaaaagtattgtccagtcctttttaagttggtggctgagcttggtgaggtgtgtttttaaaagaccattagttcactgaatactaagagcctgagaaactgcttgggtgatttgactaataaagtccagtctgttataggaccgtatagaggtgggaaggccaaaccgaggaattatgtttccctgtgggaaaggcctctacctatccagtgaaagtgtctacctagaccaagaggtattttagtttcttgactcggggcatgtttagtaaagccaatttgccagtcctgggcgggggcaaatcctcgaacttgatgtgtggggaagggagggggcctgaataatccctgaggagtagtagaatagcagatggaacactgagaagttatttctttgaggatagatttccacgatggaaaggaaatgagaagttctaagaggcaggctagtggcttgtactatagcatagcctgcctttgctggtgtgtggccattaggcctggtggaactgccatcaataaaccaagtgtgatcagggtgaggaacaggaaagaaggaaatatggggaaatggggttgaatgtctggtggatcagagatacagtcatgggggtcaggcgtggtatcaggaataatgtgggaggccggattgaagtctgggccaggaacaatggtaattgtgggagactcaacaaagagtgagtacagctgaaggagccggggagcagaaagcatatgcgtcaggtgtgaggaagaaaatagattttggaagttatgagaactgtagagagtgagttgagcatagtttgtgattttgagggcctctaaaagtattagggtggtggcggctgccgcacgcagacatgagggctaggcaaaacagtaaggtcaagttgtttggataaaaaggctacaggacgtgatcccagtccttatgtaagaatcctgactgcacagccctgcacttcagcggtgtgtaatgaaaagggttgggatgagtcagggagagctcgggtgggagcagtctctaaagctgtcttcaaggaatggaaagaggagtggggaaaggatttaggatctatggggtcagctaggtttccttttgtgagtttatataatggttttgttaggatggcaaaaccaggtatctaaagtcgaaagtatctaaccatgcctaggaggaaaaaacttgttgttttctagaagggattggggtttgggagattagtcagacatgatcagcagggagagcacgtgtgtttttatgagaattatgccgagataggtaacaggtgaggaagaaatttgggcttgactgaagtaatgggggctgtctgtgaagccttgaggcagtacagcccaggtaatttgctgagcctgatgggtgtcagggtcagtccaagtgaaagtgaagagaggctggggtgaagggtgcaaaggaatagtgaagaaagcatgtttgagatccagaacagaataatgggttgtggagggaggtattgaggacaggagagtatatgggtttggcaccacagggttgataggcaaaacaatttggttgataaggtgcagatcctgaactaacctgtaaaccttgtctgcttttaggacaggtaaaatgggggaattgtaaggggagtttataggctttaaaaggccatgctgtagcaggcgagtgataacagactgtaatccttttaaagcgtgctgtgggatgggatgttggcattgagcggagtaagggtgattaggttttaatgggatggtaaggggtgcatgattggtcgctaaggagggagtagaggtgtcttatgcttgtgggttaaggtggggagatacaaggggagatgtgaaggaggctttgaactgggggaaaaggcggcaatgaggtgtggctctagcctaggaatagtcagggaagcagatcatttagttaaagtgtctcggcctaatagggaactgggcaggtggggataactaaaaaggagtgcttaaaagagtatcgtctaagttggcaccagagtttgggagttttaagaggtttagaagcctggccgtcaatacctacaacagttatggaggtaagggaaacaggcccttgaaaagaaggtaatgtggagtgggtagcctccgtattgattaagaaggggacggacttaccctccactgtgagagttacctgaagatcggcatctgtgatggtctagggggcttctgaggcaatcgggcagcgtcagtcttcagccactaaaccgagaagatctgggaaggagtcagagagccttgggccagagttccaggggctctgggagtggctgccaggtgagttgaacagtccgattttcagtggggtcctccacagatgggacatggcttaggaggaatcccgggctgcgggcattccttggcccagtggccagatttctggcacttgtagcaagctcctgggggaggccattctggaggaacccctcgcagctgcagttcaggcatttggagttcttctgtgctggagatatggctggggtttgtctcacagtggagggaaggaattgcaactcagaaatacattgctacttggctgcctctactttattattgtacaccttgaaggcgaggttaattaagtcttgtggggtttgagggctggaatttaatttttggagtttaatgtcgggagcagattgggtaataaaatatatattgagaataagacggccttttgaccttttagggtctagggctgtaaagcatctcagggttgttgccaaacgagccatgaactgggcttgtttttttatttgatgaaaaagagcctaaacgctatctgatttgggataaagaaaaaggagcattaaccttgactatgcctttagctccagccacctttttaagaggaaattgctgggcaggtgggggagggctagtcatggaaggaaactgtaagccggaccgggtgtgaggagcggaggtgataaaaggattatagggtggaggagcagaggctgaggaataattgggcctggcgaggaggggagaggtcagatgggtctgtagaaaaggaagattagaaagactgagcgatgcttggggttgggactgaggggacaggtgggagggaaagaaggaagatttggaaggagttgcattgggaacagagactggggaggggcagatgtgtaaaagaatgcctggacatcaggcacctcagaccgtttgcctattttatgacaagaattatttagagcttgtaggatggaaaaattgaaagtgccgttttctggctatttggaactactgtcaagtttgtactggggtcaagtggcatcgcagaagaaaataaggcatttaggttttaggtcaggtgtgagttgaagaggttttaagttcttgagagcacaggctaagggagaaaaaggaggaatggagggtggaaggttgcccatagtgaaggaggcaagcccagagaaaagggagtagagacacggagagaaggggtggggggttcttgtcccccagaaaagcggagaaggggtagagacatggagagaagggttggggggttcttgcccccgagaaaagcggtacttgccgctaaaggtgaaggaccaaggcaggcgtccccgtgtggtcagacacctctgaaatgtgggtgaataatcaggcaggcatccccgcgtgattaaataccaagggaagactcttccgagtccgtgaccggtgccggagttttgggtccacggataaaacgcatctcctgtctctaccagaaaaggaaaggaactgaagttaagagaagggagagattgaagtggggcgccaagattgaaaggagaaagaggttgagggatagtgagaggttggaggagagagtaaaaagaggccgcttacctgatttaaaattggtgtgatgttccttgggctggttagtctgaggaccagaggtcgtaggtggatctttctcacagagcaaggagcaggaggacaggggatagatctcccaagggaggtcccctgatccgagtgatggcaccaaatttcatgcgcgtccgtgtgaagagaccaccaaacaggctttgtgtgagcaataaaactttttaatcacctggatgcaggcgggctgagtccaaaaagagtcagcaaagggagacaggggtggggccgttttataagatttgggtaggtaaaggaaaattacagtcaaatggggggtggttttctggcgggcaggagtgggagtcacaaggtgctcagtggggaagctttttgagccaggatgagccagggaaaggaatttcacaaggtaatgtcatcagttaaggcaaggaccggccattttcacttcttttgtggtggaatgtcatcagttaaggcaggaacaggccattttcacttcttttgtgatttttcagttacttcaggccttctggatgtatacgtgcaggtcacaggggatatgatggcttagcttgggctcagaggcctgacaacaacgatcttgtagataggtactgttgtaattcccagtttacaaataagaagactaaggtatagagagattgagtaatttgcccaaagcccacagctagtaagaagccaagattcaaacccaggtaatatggctgcagacctggtaatcctaaccattacattaggctgactctcgatagttaacttatttaagctagtgttaatcacatcttaacaagtttgagtaataaaatcttaggttgaaaggggccttcaagatctagtctaaatcctttcaggagttcttccacatttctgctagaaaacactttggcctaggcttaaaacttagtgatggggaactcctcactttgtaaagcagcctgttcagttcacaaacaccctaataattaggctgttatctcttgcattgagctgaagttgatcttcccataacctctgcctttctgtctatatgtatgctttggaaatatacacagtaagtgtaaaccctcttggcaaagacagcccttcaaatacttgggaggcattcaattccccccgccacctcccgctctactctcactaccaagtctttagaatagagtacaggtatcaaaatcaaaacaaacagggagtagaaacttagtgccagactttaagtattttttacttataaaatctttttgtgtaacgagtagagcaactcctaactgcatatatgtactaagtttgcaaatggggcaatttgtttttccccatgcactggcatcagaggtggtaaatgctggcctgtcagattcaatgcattttgctgggttagaaccgcaagggctttccaggggaccaagctctctctgctgtaatcattaaaacctgcagaatcctgtgtgactctggggagaagcccagtgctcttggccctcatccaccctcactaggaaagctgcttaaaactaggacagaagaaacaaccactggcttaggatcagtcctcagacctgccttggcactaccccttttattccaaattttgcagtggcacctccaacttcttggtcacgttttgtaccttgtctgtttcctcatataacttcattccaaattccaacccatgctctgacatttcctctccattcttgctagacaggaatttctggatattggatattggcccctgcccataccctgactctgtatattcttttgtcctgctgaccagtttgagcttctgaataacaaaaactccccaaccactttaaagtcctctactttagcttgatgggtccctctcctgtattttctgaccttgactctgctctctgtacaaatagtaattacactcacccccaagcagagaatctgtgtcaaaatccatcaggatatctaagcacatcattatatctgtcaacttccccagactcctgatctcaatcccttattttcaacaacctggcaccgacagagtataatttcttttgtatcatgatgcagtttgatgtgcttttcgaaaggttatggtggtgattttaaagagatctgttttgttagaggaaggaaggaaaatagtgctgtttgcttccatgcagttcctcagagcctatgccagggtgatttcagctcatgagagaatctaaagtctaaagagatgtgtggagattagaaacattggtgtaaaaaatcagattacggagacgtaatatccagggtgtcagaggaggcagggagcttcaatcatgtttgaaactataggtcccacccaacaggatgagaaaatacaggagaagccagaaaaggtacctgcttgtgggtaaaatcaattaaatggaatcaatggtatggtagccatcatttctttcttttcaaattgtggtaaaaacacataatgtaaaatttaccattttaaccattttttagagtatagttcagtaatgttaagtatattcatgttgtcatgtagtggacttgcagaactttttcaccttgcaaatctgaaactgtacccattaaaccacttctcatttcctcctttcccccagcccctggcagccatctttctactttccgtctctatgcatttgactattctaggaacatcatgtaagcggaattatacagtatttgttcctttttggactggcttatttcacgtagcataatgtcctcaagtatcacctattagctgtcattgcttgaacacggttttctgccaagcacatgatctcgttttattcccagcacaactctcaataacaactgtgtaccttttttccctttcacagattaggaataaaaggctctccaagactaggctcagaagcagaagcagttggagagttgcttgcagaaggattattgtcatactgggaagtgctctcaggatttacacctctaagaaactgaaaggggcatgactgcgcagaggaaaagctggttcaccatgcagttgcaattatggctgcagcaggagcatgcagggaagctctggagtaggtttggcctttcagagttgtccccagtaaatcaaatgggtgaagactttaacccatttatgctggaggttgcaaaaatgttttgtgaaaagtcagaccttggcgatgaccttgagcagtaggatataaaaaactcccacaagcttagcgtcccaataatggaacactaggcataaatgagttaatccctgcatcagccagtcattggccctaggtctctccctgagggaggggatgtagctgtgtgaggcagttccctgagggcacattccaatgaaggccccagctgtgagccagcagccaataaggcagcaggtggcccatgcatgcaaaggccctaaagaggaggtccagggtggagcgccacggtgtctactacagatgctgaaagagtaaatacattttatttatttatttatttattttattatactttaagttttagggtacatgtgcacaatgtgcaggttagttacatgtgtatacatgtgccatgctggtgtgctgcacccattaactcgtcatttagcattaggtatatctcctaatgctatccctcccccctccccccaccccacaacagtccccagagtgtgatgttccccttcctgtgtccatgtgttctcattgttcaattcccacctatgagtgagaacatgcggtgtttggtcttttgtccatgtgatagtttactgagaatgatgatttccaatttcatccatgtccctacaaaggacatgaactcatcattttttatggctgcatagtattccatggtgcgtatgtgccacattttcttaatccagcctatcattgttggacatttgggttggttccaagtctttgctgttgtgaatagtgccacaataaacgtacgtgtgcatgtgtctttatagcagcatgatttatagtcctttgggtatatacccagtaatgggatggctgggtcaaatggtatttctagttctagatccctgaggaatcgccacactgacttccacaatggttgaactagtttacagtcccaccaacagtgtaaaagtgttcctatttctccacatcctctccagcacctgttgtttcctgactttttaatgaccgccattctaactggtgtgagatggtatctcattgtggttttgatttgcatttctctgatggccagtgatggtgagcattttttcatgtgtcttttggctgcataaatgtcttcttttgagaagtgtctgttcatgtccttcgcccactttttgatggggttgtttgtttttttcttgtacatttgtttgagttcattgtagattctggatattagccctttgtcagatgagcaggttgcgaaaatttttctcccattttgtaggttgcctgttcactctgatggtagtttcttttgctgtgcagaagctctttagtttaattagatcccatttgtcaattttggcttttgttgccattgcttttggtgttgtagacatgaagtccttgcccatgcctatgtcctgaatggtaatgcctaggttttcttctagagtttttgtggttttaggtctaacatttaagtctttaatccatcttgaattaattttcgtataaggtgtaaggaagggatccagtttcagctttctacatatggctagccagttttcccagcaccatttattaaatagggaatcctttccccattgcttgtttttctcaggtttgtcaaagatcagatggttgtagatatgcggcattatttctgagggctctgttctgttccattgatctatgtctctgttttggtaccagtaccatgctgttttgcttcctgtagccttgtagtatagtttgaagtcaggtagcgtgatgcctccagctttgttcttttggcttaggattgacttggcgatgcgggctcttttttggttccatatgaactttaaagtagttttttccaattctgtgaagaaagtcattggtagcttgatggggatggcattgaatctataaatttccttgggcagtatggccattttcacgatattgattcttcctacccatgagcatggaatgttcttccatttctttgtatcctcttttatttccttgagcagtggtttgtagttctccttgaagaggtccttcacatcccttgtaagttggattcctaggtattttattctctttgaagcaattgtgaatgggagttcactcatgatttggctctctgtctgttattggtgtataagaatgcttgtgatttttgcacattgcttttgtatcctgagactttgctgaagttgcttatcagcttaaggagatttggggttgagacgatggggttttctagatatacaatcatgtcatctgcaaacagggacaatttgacttcctcttttcctaattgaataccctttatttccttctcctgcctgattgccctggccagaacttccaacactatgttgaataggagtggtaagagagggcatccctgtcttgtgccagttttcagagggaatgcttccagtttttgcccattcagtatgatattggctgtgggtttgtcatagatagctcttattattttgagatatgtcccatcaatacctaatttattgagagtttttagcatgaagggttgttgaattttgtcaaaggccttttgtaaatacattttttaaggtcacacaaatgacatatgggacagaacagtgtttaacttcaaaactcatgttctttctgctatactgggccttctctccgaaagaggcctaatttgcacactacagtcaagcttagaatctattcatagttaaaatgtggagtcaaagcccaggaactatgtccttcaattcatctttcattacttacctattccttatcattcccgctgacaccaaccattttttctgacccttgtcatgaggagtgaagttgtatcattgcagcagctttctacttgtactctatgcctaaaatctctccttcctccatctggtcagccaattgctgtcaagttaatcttgcaagaacactacttttgccagtttaatttcgcaaaactcctgctgtgtgccaggagtgtcccagacatcaggtagtctaagataagcgatagtctctgcccctaagccgtttgcaacctttggagagacaacgtcattatcaccaccagcacccccattaagctcagagctaatatatgccagatgagactctgccagtcactgtgctaaggacttgacatacgttatctcccttaattctaacaactactttctgaggtacctctgatgagtagtatcatttttagatacaaaagcagaaacttagcgagttaagtgctttgcccagtggctctcagttgagaaacgaggtagtcacaccaggcagtccaacttcagtacctgagttcttaatcatcatgtttacaactttggctcaacattgtcaccaagatcgggttcaaatacatccattatcaatattctttctgtctccttgtatgtccaaacaaacaaaacaaatgcttccctcctgatgaggaaagtctccaaatcttgatacctgctgtgtctggacagtttttcctgctatttgctgagtgctggaaggattccctcaatccagatgtgattgcagatccagctcaagctcagcgtcctccagggaacctttgaactaaccacccagaaacgagcctttcaccggacactactcattttcacatatctagatcttatttccccatctgaactgtaagtgtcttaagagctgattttgttgttttttaataaaaaataattcttagttttttttcttattaccaaaaaattattcgccattgaagccttctgaatttttaataagaaaactattggtatattgcttcaaaaagaaatctaagcttctagattcttgaaaagggatagtgacagaaccttagaattaatattcaatataactaatctgatgaaaattcagtcattgatacattactgagaactactagatctcagcatttttaattgtagattcacatggagttgtaagaaattatacacggactccacatacctttttaccgagtttcctctaatggtacacctgcaaaactctagttcaatgtcacaaccaggattttgacgtcaatattgtcagtatacagaacattttcatcactacaaagatccctcctattggccttttatagccacacccacttccctgccccccctacctcctacttccagcaactactagtctgttttccatttctttaattttgttatttcaataatgttatatgaatggaaccatacagtatgtaatattttgggatggacttgactcactcaacataattccctagagatttctctttttatatgcagcaagacttgtttcctttttatcgtgagttgtatgctatggtttggatataccctagtttatttaatcactcaccccttgaagacatctgagttatctgtagttttggactattgtgaataaagctaccaacattaatgtacaggtttttgtgtgaacataagtttttatttccctgagataaatgctgaagagtgcaattgttaggtcatatggtagttgaatgtttagttttaaaactgccaaacttttccgaagcgtctgtactattttatattccaccagcaatgtatgagtgatccagtttctctgcatcttcaccaacatttggtgttgtcattattttttatttttagccattctgatatgtgtgtaggaatatctcattgtgcttttaatttacgtttccctcgtggcaaatgctgttgaacaacttttcctgtacttgtttgccatatgtatatcctcctcattgaaatgtctgttcatgtcttttgtctattttctaattcaaaagtttttttatagttcggttttgagagttctttctgtatcagatactagtcctttcttgtgtatagggttttcaaatgttttctctctcatcttttcatcttcttaacaggggatgaaaaagaattttaattttggcgaggttgaatttatcgctttttccttttatggatcatgcttttgtgttgagtctaagaatactttgcctagccctggatcccaaagattttctcctgttcttttttttttttttttttgagacggagcctcgctctgtcgcccagcttggagtgcagtggcccgatcttggctcactgcaagttccgcctcccgggttcacgccattctcctgcctcagcctcccgagtagctgggactacaggcctccaccaccacacccagctaattttttgtatttttagtagagacggggtttcaccattttggctctcctgttttatatgtcttatagttttacattttatgtttaagtctgtgatccatttgatttttatataaagtatgaggtttaagttgaggtttattttttgcatatggatgttcaattgctctagcataattatttgaaatggctggcttgattattgaagtaaggtcagacttatttctctcctgggcttcagacccagccaccttctatgtttcttgtccaccacaacctgaatgtcccacagacacctcagacttaacatgtccccagcagctcattattatcctccttttgtcccaatccaccctcaacatttttccctccctaattgtgctgttcttatgaacgctacgcttcacccaattgcccaagtcaaaaattagggtattatttctgaatctacttttatctttaaatctaacatgatgcattgccaaattctgtcagctctatccccaagccatctcttaattcattcccttatttacacctcccttgactccaatatcttttgactcaaatgctacatagcctctaatttatctccctgatattgttcttgcttccgaatcccttttccacaatgcgcctatagtaatcctcctaaaatgcagatctgattaggtgactctccttattttaaagtctttcttattgttttctcctgccctaaggcagaagttccaacaaatcttgttatcagattctggattaaatcccggcctcagcagtgggacctaagatagtgcctgaatttccatgaacatttattgatgacaaagagggtcttaaataatgagtgatgtagactttccactgtcaacatcacagattctggtttttaatggtattcacatttgccttctccaagagtccaggtttaatgatggtgagacctatcctaagacctggctttgtagtgaggggttacctcatcacagaatcaagaagggacctcgggccgggcatggtggctcatgcctgtaataccagtactttgggaggttgaggtgggcagatcacctgaggtcaggagttccagaccagcctggccaacatggtgaaaccctgtctctactaaaaatacaaaaattagctgggcttggtggcacacacctgtaatcccagctacttgggaggctgagacaggagaatctcttgaacccgggaggcagaggctgcactgagccgagattgcaccactgcactccagcctgggcgacagagcaagactctgtctcaaaaaaaaaagggcggggggacctgggtgcaagtaattctaagaagcaggaataagagaacaagaagaatgaagcgacaaagaaagatgagcaattctctggaactgttgagaagtgtacagaagaaaacaaatctggatataggtagctacagcctgaaatatggaaagccagagcatgtgtatacctgctcctgctcccactggttgagaattgattcctttttcatctgatatgggcaagcattggatctgagtgggacacatcctctccagtgcacccctgccttttccgctgctctgaacttcacacaacgtcggaaagattcaaaacaatgtagaaaatctaagtataaatacaaaaaggaaacaagaagtttttctatcaaagctgtgaactatatgatatgagtaagctcaataaacactgtgcagaagttgggaggggaaaaagagaattgctgccaaagcactaacccctgtggctggctatgcttgcccacccaggaagctcccatgtcatgggggtcaggggaacctagaacagaaagctgaaaggctcagggatcccttttgagaagggatgctggctatacagcacgagttagaacttgcacagaaccgtccactactgctgacactggaatcacaggtgggctgacaagatgtgatgcaagcaccagacatatttgctacaaacctcaaagtggagcagagcagcggcagtgtcagtcttcttggtgtcaatagaatacctgtttatttgttgaattctccctatatgaataataataatacaagaattcaaagcaggataggctttgtgtcattggaggagtatggagaaccatcagtgcagtaagtgtcgtgggaggtttctagacagtttttaaaagtcgatattgagtcaaccatcaaatgtgaacaattctgatatgccagagcatttgtattcttaactcatggggttattacaaagatcaaatgaaataatcattataaagcactttgtgcagtgcctggcacaaagcacgcactcaatacatgttaatgtttatacaattattattattgattgtcagaattatcagccccacatcagcaaagaatagtaggtggtctgtcagcaggaacatggaaacattctcattacatagaagtcagtgttgcagggacagtcattaaaacaggatctaattttagtcttctgagggaaaatgctaggttctccggaaatgttgaatccttcctcgagcatgtagtttaatttttcaaaattatattgcatatcctgtaaaatgaaaatgaaattgtactgctgttcattaaaggcccccaaaaatcttaggcactatacaatataaatgaaaaaaaaggcgttatttttccatagggcataattagaaataaagaagcaaggtcactcacaaatttccgagctataaaggaggaaaggaacaagattttcccccggttattttatagctgccaggttgaactcatacttatccaatgagccccagaatggaataccgttctacaccaactgtactgatgatagtgattcagggagtaaatgataagattccatccttctaaagtgcttttgggattggattctagtaagtttcattttgctattggccaatcacaaaagagactacaatagagaaaagtgaagacatcatgctgaagacagactgctgcatagaaaaggaagagggaccccctaatttagagatatggatggagaaaaaaaggcacttatgctgtagcataagggaaacattaaataaagctataatagaggagaaaatgtctttgaatagaagaaaaaaatcagacagacagaaatagactaaaatgctaaaaaaaaagatacaaaaggacattgaaggggacatacagtgattattacacaaattaaatgcacacagttaaaagggaggtgaaaagcttctaaaaagaatgagtgtgtagtgaacttaattttatcatctttactaagacaaagttaaagtccctaaaatattttaagacacttaaaaaaaaaagtcttaaaattttgagagcctttcagctctgtcaactctagactttccctcctacttaagttttttttcttttttttcttttatcttttttatttatttatttttttttttatgttttttttttttttttttttttttttgagagagagagagagtggatcagccttaataagagaatggtcttctgccaggtggtattctcctaatccctttccagtgagatccacaagggttcaaaaccactttctggggtcttagaggcaccacttatctctcttcctctgctcatatctttctgctccagtgcccgcatagtttgtgttatcagtggtgcgtagcctgagacatccacgacctatgccagctctcgaagtaatgtgattggcatccaaagaaacacaagaagcccatgatttcgtccctttgcaatttaaaatcatatttaaaatgccttttggtcatacaaatttgaaaatgatcttgtaaatcacttccgggaatctatggtcaaaactcagcttagagttctctacttcttaacagagtgcctgccggtaactagtgactgtcaatgagtttgaaaacataaattgatgtgcaaatgctagataatagcaacatcctgtgcaactgggcagcatttctgttgtttggcttttttattttcgtggactctcccaatctgagagaaaatagatttgagttcctttttaatcggtttagacccagacaaggatttaattggtttagaccccattcacctacgtgtgtcactctgtctccaacataacagaggagatgaccaagacaacatgctctccagccaggaggtggggaatactttggtgtcatagcagacaattattgatggaaaactcatgttagaaaatgtaaggtaccttcttctagacggagtaaaaggggcagctgcccagactttcattttaaatagggagcccatgatacaaatcttttaatacaattttaaaaagaagagacatagggggtatctcttaggacctgtcaacaaccaaccctctatcaaatggccaaatcacaggtggtctgcagcttagccaaaatgtccaagtacctttttgtaacacagaatctcctttgaagatccagctttcattaatgatccccagcagctctggtcaatgtgtcttttcacaaatgaagctttttaaaagctttcagtggacaaatgtggctttgagttttcaactaaatctttctgtttaaaaggagtgctgaaatgggcatactttataatcttaaatgctgcacacaaaatactgaaatattattgaccctgagaggttggttcaaatcaaatagcatactcacgtaaacgttctcttttcctaatattagcaacagggaatgtgaaatagagaggggcgggatatgctggataggggtgcaccaaaattttcaaaaagcctcgaaactagtgtatattgataaccttgtggcatctaatatctagtattctttttttttttttttttttgagatggggtctcgctctgtcgcccaggctggagtgcagtggtgtgatctcggctcactgcaacctccacctcccgggttcaagtgattctcctgcctcagcctcctgagtagctgggattacaggcgcccgccaccacgcctggctaattttttgtatttttagtacagacggggtttcaccgttagccaggatggcctcgatctcctaatctcgtgatctgcccgcctcggcctcccaaagtgctgggattacatgcgtgagccaccgcacccagcctagtattctatgtctattatttcttcataatgagactgggggaaatctttggagaattaatgccgcagttggtaaaatcattctataataatgggtaccattctgctctgtcccacatttttatgaagtctctttaaatttaaaaaggcaatgtgctttgtggttcttgagcaacttaaatacgttgctctgaatagttattgtgatgaggtaatttgtaacaacttttaggatcaatgctaattttcttaaatgtttctgtagtttcccctttattataaagtatattaggctggactcttggctgtaagtgacagaaaactcaactcagattagttaagaaacaaaagggtgttggtgacagtggtggctttcagactattgctgcaggcccacctgccatcctcttaacaccctcaacataccctgcagaaaagagagagctactctgacccgagagcttaaagactggtcaagtatgggcttgactctttatggcccaaattgggtcacatgcccacctaggctaggggaatggaatcgtggaattgattgattgattattgttgcaggttgagtcctccaagaagcagatgccagggcagatttattgcagaataacacctgtgaagaaataggggtggaagcagaattgaacaagggaagccatcagatcacaatgcagatcttctagactctgtgtcagcacaacaaggaatgccagagcaaagactgccaattagaggaatactgaattgggcagatctgacaatagtctgtatataactcgggactgttaacttctccttcctcaaccagttatagacatagaataggactctcttatctcaaacatcaatatctgtgtatatgaagtagagggtgaaagtttactgtacactagtggttctcaaccaagagcaagtctgtcccccaggggacatggcaatttctggagacattttcagttgtcccaactggtgaggaggtgctactggcatctagtgggtagaagttgtggatgctgctaggcattctctataattcgtgggatagatagcacaacaaaaaattgcccaggccaaaatgtcaataatgctgaagttgagaaaccttgctctataaagatacatgtcttggccgggcacggtggctcacgcctgtaatcccagtactttgggaggccgaggtgggcggatcacgagatcaggagatcaagaccatcctgggcaacatggtgaaactcatctctactaaaaatacaaaaattagccaggcgtggtggtgcatgcctgtagtcccagctactggggaggccgaggcaggagaatcgcttgaacccgggaagcggaagttgcagtgagccgagatggcgccactgcactccagcctggtgacagagcaagactctgtctcaaaaaaaaaaaaaaaaaaaaaaaaaaagatacatgtcttatgtgtactgaaagaggccacggaaaccttttgttgatacattcttgatagtttttgttcttatatgtagttatgaatacttgagattccatccaatttatttaacttttgaccagaaagggtagattgaattggtgaaacatctatatcctgaatatttaaaagattctgttttttaaaacaaatattaacttgaattaacgtaaatattcttagtagttaaagtccttaaagaccttagtttggtgaacagataagaatcatctgtgttcagcatatgcattgccttatgaagatggtaagtcaaaagtatgagtttatttctgatatttaaatatccctgaggtatagatttgtttactctggaagtttactctgttgtttgtttgtttgtttttgtttttgttttttgagacggtgtctcactctgtcacccaggctggagtgcagtggcacgatctcggctcactgcaagctccgcctccggggttcacgccattctcctgcctcaacctcccgagcagctgggactacaggtgcccgccaccatgcccggctaatttaatttttttgtgtttttactagagacggggtttcaccgtgttagccaggatggtctcgatctcctgacctcgtgatccaccagcctcggcctcccgaagtgctgggattacaggcctgagccaccgcacccggccttactctgttgttttatttcttcattatatattacaaagttgaatgttagggccaggttagatcggaaaacaagttaagtattccttatccaaaatgcttgggaccagaagtgttttggattttttatttttgtggattttggaatatttgcatattcctcatgagatatcttgggatgggacccaagcctaaacatgaaattcatttatatttcgtatataccttatacacataccctgaaggaaattttatacaatattttaaatacttttgtgcgtgaaacacaaaagttttgactgtgacctgtcacatgaggtcaggtgtgaaattttccacttgtgacgtcatgtcagtactcaaaaagtttcaaaatttggagcatttccgattactttggaaaagtctagaaaaagtttgatatcagtgcactgaaatcattttcaagtaggaacaatagcgatactagccctttactcatgcaaaattcacagtttttatctaaacaacacaaaatcattcaatgcttttatatttaatcatctatattcacctaaccataaaaaatcaatttcaatacagtaaggaaaagacaagaaaacgaatcattctaatcactgtattttgaaagttctttgcaaacaaccgtgaaatggttaaaagataggaggatggagaccagcctggccaacagggtgaaaccccatctcttctaaaaaatacaaaaattagccgggtgggttggcgcatgcctgtaatcccgggtactcgggaggctgaggcaggagaattgcttgaacctgggaggcaggggttgcaatgagctgagatcatgccactgcactccagactgggcaacagagcaggacgtctcaaaaaaaaaaaaaaaaaaaagatggtaagagaatgatgacttgttgcttactaaaataaaggaaagattgacactataagtgatactgtttgaaatctcaggaatctctgaatcattaagattatatcacaaatggcatgcaaaatacctgttcaaaaaatactcctcatggacatgagatgctaagctgctgatactgagtctgacctaggacaatgatgttctgtgtcacctcttttctgatgcctcccagattgctcctggcctcactgctgtctcacttccaaaaatacatattgcccttattggtcataacacagagactatcagttcaaaagtctctaattcgtctcagctgcagtcatctcccagcaagacacaaggttcttgagaaaagaaatttttcatgtcccatctttgccatccaccacacgatgaacatacagtacagtgtacatagcagcccttgaaaatgctggtggaatcattgattcttgaacccaactgtcatactttccagatttaagtcctggtaaatgattaaaatcgtatgggttaccctcaacaaaccagctcaagtatttactataaaaaagggaagctagatatggaacttcccctaaagatgggtctgtcaaactcaccccattgtattctgctctgacaccatgttttttgtttgtgttatttttttttaagagacagggtctcactatgttgcccaggctggtcttgaactcctgggttcaagtgatcctcccacttcagcctcccaggtcactgtgagagattacaggcttgcaccaccatgcccagccccaccttttaatacaaataagtaacagttaccatttactcagtgctcaccttataacagatgctgttaaacgctttacacgccttagctcatttttagttaaatacattgtttttgccccagctatggtagggatcttgctaacaatgagaatgaatgataagaggggctttaaggagaattcactgccacacctttcataattttcccatcattcctccagtctttgttcaaccgtccatgatttactgatttgctattacatcaaactatgctgcaacaaaccagtggttccttctgatttttatccatctcctcctcacctagggtgagagtctgaggcttccttgagtctactttctgatattgttacatttaacacagaacatctcttgttttcgtttctggcagcttatcctctcttcgctttctccatgctttcattcatcctaaaacaccattctgacaatgatatttaggttggtacataagtaattgtggttttaccattaccttcaatggcaaaaactgcgatcacatttgcaccaacgtaatatttttcttacttaaaaaattaatgtagagtatggaaatacttgccatcagggaatggggaagaaaatggctagagagacatggtgaaagagagacttgatttttaaataactttttttgtttttcttgaattttattatcatgtgaatgcatttgaaagaaatacaattttaaaataattattaaaaaaatatttgaatgccttcccatgaacaactaaatgaagtctctattcttaaacctgacagtcaagtacagctctggtttgactccaagctacatttctagccttgtattattcaactctttttctgtttatccttcatatccgggcctttactagtgccaaaaaaaaaaaaattgctcattctactcttgtcacccagagtgtttcttctgtttttgcccatcaaaagcttacccaattgtgaaggcccagtttcaaagcaacctccttcattaatttcatccagatactctgtaacccccatagctgtttaggcttgttctagcaatttgcagttatcagaaaaatgagtacataccgagtgccagaaagtggtctctccaactgtgcacattacaacatctcattctctgtgcctccatttcctcatctgtaaaatggtcactatggtgtactttcctcatagtgatgttcattctttcaagtagttagttaggtacctactatgagacaggcactgacctgggtcctgggggtacagtaatgaataaaatagattgagtcctgccctcatcaaatttaccttctgataagaaagacataaatgaaatatacctataatgctcttgaaatagcacttgggatatagtaaatgctctataaatgtttgctattattactgtcattgttggtagtgttgttatgtggtatttctattaacacataaagaaactaaggttcacaggctgttagataagatgctggttaaatagctagtaagggactccaactcaggtcttcctgagtcataaaattcgtggcatttccactacactgatggatgtataccaggctgtacatcagaactatctgtggagacttaaagaaagtaaagattctcaagcctcagcctcaaattaactaaatcagaaattatttagacgagctaagaatctgtatttttttgaaaagttctcaaatagttgtgatacactgtcaaattggggaatgactgcactacattaaaatctttcccataatactttattatgcttatttgtaaatatcaaatctacaaattcactaaagaccatccccttgttttcttatttatttttattttttctgcttcctctcctagcaaagtgccttataaacactcaataagtatttgagtaattaatggcttaattatttaaagttgcacttaaaatgcaaatactcacagctgtggtactggaagcctgttatgaacaatcatttatcttcctagggttatttactaatcagctaaggacaagcagttgggaaagaaaggctgactatttgggaacagaactgagaaggccctcaaaccaaatgttagccacgttattgaacagcctagggccccgccttaactttacctacacttcgttgacaatttcaggtaaaatgcagaaaatatacgctaacaatcaggagattcctccctcacaccattgtagtttcatttcttttaagccgacacatgtctctcttatggaaaatatgggaacaacctgttttaaagaaagaaaaagaatcctttattcttgtcacaccacaaacatggagttcactgctatacgttaagattataaagcaaaatcccaaaaacgcagtgactgattattcacagtagacatatgaagtcaggaagcttattttttctctctttgctaaggcacaaagcctggggctatatgcatttttattacactgtactgtgttgatttcacttgaggattaaaaagagagttgaggcacagtgcacgtatcttgatggattttaggatttcttgctttcgtgaaagaaagaagcttataaagtacctcagattatcgcccagggaagtgtacctacttccatgatgacctagaaattcaatcttttgtttctcctataaaagatcacattgtactttggatgttttccctgtagttttctgcactatgtaaagccacatttggaaaaacaaaatagttttagtttagagttgaagtgaaaatatctgaaatagttcaggaaagtcttatgagcatttggggagcttacaaacagccttgggggtggggtgagggggaatgagggaagagggaggcagggggagagaagaggagggctaggtcagaagtgtgcaaagaagacagagggagagagaccgtagagactgtgagtccatggcagagttttaattctggttctcacacatctacacagagaaacaatggaagcacattgctccatcccctgtcctttactaagaagcgtgaagtaaataacttgtggcttatgatatgcgaagaagagagaagacagaatgttgtaggatttggaagtacagtagatgagatcttccggtttattgatttgtaaagaacggcttgatactggtttgtcagttctgcatcagtgagagaaaagaaaggcgcttttcagtcacttgccagaggaggagagccgggaagtggaaacagggtcttctggcggacaagcttccttgagtggtggtcaaattgactgtgaagggagtcaaggtcaggaagctttggaaatgctgcaaggatggtacgggatttaaggagggttgatttcctcggttaagggttgttgcagacttcagcaaattcccccttccagcctttattaaagaagtgtttagtagaacaaactgaaaatctacaagtatattgttacccaaaatataaaagcttctgccactgagatgaaaatgtttgatttccagtgctttatctttttgcatttatctacctgtttcagtcattcgttaatatgaatttcctaatatatgccgtcttttttttttttttcggacaataccagttctatggtatctcactgatgattatttcaaattgccacttttgttccttggaaatactcctgtgttcaaataccaggaggcataattatgtaattaccatgtgaacattatgctacttatgggccaaaatgcccctagaaaggaatgctccaatggcctcagaaaatttctgtgagaacgatatcttccaaatgtggtataaataaagctcaagaataaatagctaaggctggaatgtaaatgatttaatgtaatgatgttgtaaggtgagagccacttgactttagttcctgttgcaaatcatgagatacattaggaaaacttttaaaagggaacctattttttaagataaaatctgtatcaagttacatcaccttccaggcaaagtaattcaactttcctcttttctctctgagaccaaaaaaaaaaaaaaaaaaaaaggcagaagaaatgcttcctatgatctcttctcttcctgtcacaattttcataagtctgtagatgtaattaaaactaaagattttgacaaatgaaacaggataggaggttgattgctgcttttctaaattaaaatgaatgatacccttaaggtacttgggtctatgaagtcaatttaatgttgatataacctgactccattatcacagaatgaggcagttgcataagcaagaaaaccaataaacaaacatccaaagtgcattttagaaatcggtgaggtgaaagattaaaggcttaacaacggacaaagagcttgctgttttgttctctcttgccttccagtttgatggcagagttcatcagaattagaggaagaatgttcttggagaagcgttgggctggcactaggctaggagtcctattcatatcctgcctcgcttgtcttgcaagcatgcacagccccttcatttgaggcactgtttgcctcagcagagtctgtgtactcttctggtaggttgtatagaacataataaagggggagggctggaggagaaaggacagaaaaaggagggaataaaaaaaggagtcagattaagaaagaagtcagcacagaaatataaaatggaaggaaaaaaagctgtgatgcaggaaccttaaaaggtagattaaggatggtctcagatggcacggcattagtatcaatgccataagtcacacaaaatctattaagaattatgctcctactcagagtgagtgccatgttagcactagttgtttcccgtgatctatcctgaagtcaaacgcaagaaacactgtttaactcctaagtgccctaatgtcaggaaaacacagaaataaactcaaaggaaagacaattcagttaatctttgcattcaacaagcccaggttgttttgccgcagagctatacctatcacaaaacttcattccagaagatggccggtagaggtggctcatgcctgtaatcccagcactctgggaggcccaggagagtttgaaatcaagaccagaacttatctcagactttttttttttttattattttttcagttacaactcaaaagaatcagaattagaataataatggattttaactgaaagggattaccattagttaaaaggattttaactgaaactgtaatcagtctcaggagcgtttcccggataatgtttgggcacgtatttatgagtgttacttgtgaggatttgggagtaagaatgaacgaggaagttcctcccccaacacagacacatgcacacagaaactgtacaaactgaaaaacttcaggacaaaaactcgtgaatagactggagagtcatttgtgtgcatatgtgtggtttatttactagcatcacagcacaagagtttctgtcttttgcttttgtttttgttttaataggctcatttgtgtaagtgtcatgtctgtttcttgcattcccatggatatttatctagggtctagacaaactgagaaccagaaaatcaaaacatacgttcctagttacatattttctctagactggagtaaacatgatttatgtatgtagtaatcagtaagatgtagcttggacactaggaagaaaccacattgcctagcagtgtatttccacatggggaggtaatgcctgtctctcctaaacttctagtgaagataaaactcaaagtagagtaattaacagaaaggtcaaaagacaaagtggaagcccttgagaatctaaaacaaagttaaagaaccaacatttacatttagataaatttatttgaaataatttctaagagccatgatgttgttatcggtcctttttctttctttcttttattcttttggcttatttaaaagcaatgttgaagaaaaaatgaaataaagcttatctttcacaatacacagaggaatggactgagctttgggaaacagtcacagcttggaattaagagtgtgtgtcgtatcgtaatttagttggatgatttggtgctcattcattatacccagaattacgctttcaagtctaccgtattcatacttatctcagtgcctgacaaataagaggaactcaaaaagcctttcattcattcatccattcagtatttcttgatcatcttctatgtactaggcattgtgataaattcttaacaagacagataagatctctgtctttgtggacaataaacttacattctagtcaatatcttttgaatgaatgtagtgatatttcttactgaagctaagaaaggaaggtctctgcaaacagtatactgtctacagaactcatctgaaatgagaagaccaaggagaataatatatagccctcataactctcaaatcttaaatatgattatttaaaaactagagtaaaacaaatgtggaggagatttggacttcagggttgttttataaattgccgttttacatttttaaatctagtattataggcaaaattgaatctaaatggttttcttcttttcttttttttactttcatcatcaaaaatggaagaaaggaagaaaaggaggaaggaagaaaagaaggaaaggaagaagggagggagggaagtttttcaaaagcttgtgtcagggatcttgaaaaagaaatgattcattcaaaatatagttgttaatagtaaagatccgtgaataaacagtacattaattcattcaactaatattaatttagcacctattatatgccaggtactgtgctactcactgaggatttagcagggaaagatgtgtccctgtcctcatggaacatataaaaaaggacctttttttcctgagatgcttttactgaagaattgctgcaacctagattatgagttctcatggaccagatggcagttttctgcccatctgggatagttctgaagaatagaccctcgtgtatcaatcaaggtttcttccagttctaagctttcgtgatctatgatctaatagttgaaacaggatgtatgcttccaaaaagatgttatatttgtattacttttataaaaggaaacagagacatgccctattaattcagaagagattgggttcctcctggctgtttaaatcattctatttaaactcctttatctcttctttcttggctcaccttccaaagctcactcttaccccttttagtctcacttccctttcctttctttaattgctgagacaaattgttcatctctaactggctatacatgacatctccagttaaatgtttcactgttaggacaaattcattatgttccaaatgaattcatacatacatatgctatttcttccttttctgattttcatattgccaccagcaatatcttcattctcccagtcttccttactcgaaatccaagagtttatttgcttcttcagatattaatctccaacaccaaattggatagttcttcctcctttcaaaataccttctcatatgtaccttcttttacattgaatacaatacagccttaattctaatgcatatcaacccaagtctagtaagttacaacagcctctttctgatctcagtctcaggtgccctttcgaatctgttttacactatactgatcttcccaaaccctaactttcctctaaaatagtgagtcatgtcacagaaattttcagtggttctctttgcctgcagggtaaatcttgagcctcagagtctgggacgccttgctttgcatcatcggctttcaacatgactaactaattgtatctcactgtcgtcctcaacaccactgttctgcagccccaagcctttcttcagcttgtcactacttcttacctccaaacctttacacttgcagagatcagggactatagcatttgttttttgcctatctctttcaatattaacaaatacttataaaatgaataaaccaccaaggaaagaactgattgtgccagaacataagacacaggtatatcatttctggcttttgcttcctgttttgtatataccacggtatattgatttaacatacagccagttagaaagatctaatgcatggaggctctcgtttaatagattatcaaatttcatttccttgcataattgctcaaagaataaagtgctttgttcctaagtcccaagctaaagctttcgaggactttggttgctttcaagtttttctcattcataaatttgtttctttatttagccagttgtgcattcaatccacacaaaacctttctccagtgataatttgtggaaagaaatattttatgcttaattcttctcgctgtcataccttctcttaagtttgagttatgaagatggaaattcactttgatctcattttaaaatcttgacaatattgaatgtacactggaaactaccactggagcgctccttgtataagaaggcaaaattcttcagagagaagattgggagtctagaatgaactttgatgctgcatcggctcagtccctatgaaactaacattcttactagagaaagtggcctatggcacagtcataatcctttaccatctacatcttccccttgggatttctttctcagtatgtgcaaagatttctgatcagtgtccactcccatatggcatcttcatcttctcctctctacccccaaacactcacatttatctctagattgatttattcatgaaatgacccattctaaatttagaaataatgacatatgcccaacatttatttgcacgcgttttcccacaacctttctctataatcttatggtatcacattcttcaagaccaggaattgaccttgcattgggccataaaatacgttgaacaactgcagtttcatcgatatgcacactagaattggtctgcattcaataaactgattaaagaaattaaaaagccaattacttattaaatatttataaaatactttttttcaactttaatcttcaggatagcagttaagagcaagacccagactgaatgagtttgaatcctagctctgccaatttactaactactgaagcttaggcaagttttttttttttaacctctcatgcctcagtttttatgtcaatgaagtcggggggaataatattaactcctattgcagagttactgtgaagatgaaataacataattcatattgtcatgccacatattgcttaataaacattagccatttttgtattgtatgtggtgccctgcacattatagtctattgctctccttttttgctttttttttttttttttttgagatggagtcttgttctgttacctaggctggagtgtagtgacacgatctcggcgcactgcaacctccacctctcagattcaagtgattctcctgtctcagcttcccgagtagctgggattacagatgcccaccaccacaccaagctaatttttgtatttttagtagagactgcgtttcatcatgttggccagaccggtctcgaactcctgacctcaagtgatccgcctgcctcggcctcccaaagtgctgggattacaggtgtgagtcaccatgcctggcctattcctctccttttattaaccataatagtagcaagaacagtagctggtaacatttattgagcaattaccacgtgacagaaactaggctaaatgctttacattgtatcatcttatttaattcccacaaaaccctataagttatattattttccacattttactgataaggaaagttaagaataatttacccagggacattgattagtcaaggttctccagagaaatagaagcaacaatatacatatgtatgtatgtatgtatatgtgtgtgtgtgtgtgtgtgtatatatgtatgtctatgtgtgtgtgaatatataaaattaagtattatctcatgcagttggagactaagaagtcccatgacctgctatctgcaagctagagagccaggaaaattggtagtgtgatttcagtcccagtctgaaggcctgagaaccaggggagttgatgatgtaaatcccagtgcaagtgcaggagaagactgacatcccagctcaagcaggcctgcagggaaaaaaggaacatgcctttttgttctgtttaggacctcaactgacaggatgatgcccgcccacattggggagggcaatctactgaatccactgaaccaaatgctaatcttgtctgcaaaacaccctcacagacacacccagaaatagtggtttacctgggcaccccatagtccagtcaacttgacacatagaattaaccattacagacctgcagtcagtgcactcagtgtcagtaggcatacttgtttgttccgcatcgcttctcttctcttctctctctctctctctctctctctctcacacacacacacacacacacacacacacacacacacacacgtaccacatttactcatttactcatccatttgtttggtcaactagtcattaaacaaatatttgctaccatatactatgtgcctcctgcagaaagggttggagacattcgaagagaaaggtaaacaaaaaatggtccctgctatcaagaagtttccaatctattgcaagacacactcatgtccatataactaaaatgaattatatgatagaagtgcttcaggtataaaccatatactgttagaatgctgaggaagccattaattctaacctgggagatgaggaagtaaacatataaacactaacagcattgatctgggagagaagtggggtaagagcattgccgagagaaggagcagcatgaagaagccacgcacaagagttatattggatggaatagtgcaggacaggcaggtagttttggtgggcttagcaggtagagtttgggagtgcagggtcataaggttgggaaggtaggtttgatatgtccctcatgcttttgtgtatataaaataaagtaaatcctgcattgtaggggaaccccacttggttatccacgtatttgggccaagcaaaaatgggcaagtctagggagagagtgaaaaaatgagattgttctggatatacactaggcacttaattgatattggaaggccagagttggtttgagaccaggctacctgagccacttttctgatgagattaacatcgatttttacctctcgggaattctgcacaccacgggaactaccccctgagttctgattgctctgtgcaagctctgatcaacccctagtttagcatggactgttcacaactaaatcaaaatccagagttagagagctaggatgcctggagccaccacttatattggattggcaaaatgccaaataagtaagtatagcatgtcacccgtaaaattattcctttcttccccaccaagaatagaactcactaagttgacagcacactgtgtcaatatattatagaaaaacctaataggaagaaaagaatggcagttttcactgcatgccccctaaaggtatatttcttaataatttccaagtccactgaaaactgaattccgaaaattagttttatcttactacccaccctattttatcccaaatttaagccttgcctgtacttctttgatacttaatatttttttctttgaggtggagtttcactctgtcacccaggctggagtacagtggcgtgatctctgctcactgcagcctccctcctgcctcagcctccctaggagctgggactacaggcatgcgccaccacacctgactaatttttgtatttctagtagagacgggttttcaccatgttggccaggctggcctcgaacttatgacctcaagtgatccagccaacttggcctcccaaagtgctgggattacaggcatgagtcactgtgcccagcccataattaaatattaatcaaccactggttaattaataattatcaataattaaatatcactcaatgatttattatctattaatcaatattgcttctttaaaaatttgtcaaaaacaatagcctaagacttaaagacaagacatgtcatttctgagattctgtagtcacctataccaaatgtcaccctccctaatgtttttgtgaaagtaaagatttgtatttttttatggtactaattgaagcagtagttcatttgtggctgccaatgagttgactgtaaaaaaaaaccaaaatctcattttaacattgtcgagagaggaaatcctttgtgtttggccttggattgataaaaacgagtctggaatactatatacggtaagtgaatattaaaactagagttatgaaatgttgctttagtgttctcagtcttggagactcaaagtatcttatcagaaaggatacattgttttaattgttcctcattatatagaatgagagaacatcatttctctccttttcctcccaggtggccgtcgaggaccgagtcaggcagctgcatgaagcccacagggactttggtccagcatctcagcactttctttccagtaagtcattttcagcttttatcacttaactttattgcatcttgattaataagaataacagttgaaaaaacaaaagaattaagagttgaattatagtaatcttttatcagatgcagtagaagcataaatcatcctgaaatataacttggttgataagttgagaaggttaggaagaggaaggccaattggatcattttgtccagtcttcagctaatgcataattgtttcctgcactatattctcaaatgttaaccatattaatatttttgagtctttttgaaaaatgtggaacactttgctcaggagccatgctagtattctctgtatcattattccaatgttagtatatgggctgctgaagcaaaaacatacttttgagtttttaatttctgcctatcagttcagttcataaagctaataattatgatatcatgtaattataatatgatcatccaatatatgttactgtgactctataattctttaaataattcattaaatgatccctgccttatgaaatgagtgacaattctcaaaagaaggcatacaaatggccaacaggtatatgaaaaaatgctcaacatcactaatcaccagggaaatgcaaatcaagaccacatgatatatcgtcttaccccaattagaatggctattattcaaaagacaaaaaataacagattctggtgagaatgtgaagaaagggaactcttttacagtgttgatgaaaatgtaacagtaaattagtaacagtatgaagattctcaacaaactgtaaatagaactaccttaccatctggcaatcccactactggttatccatcccaaagctaagaaatcagtatatcaaaagggtacctgcacttgcatgcttatcacagcactgtttaaaacagcaaagatgtgaaatcaacctaagtgtatatcaacagatgaatggataaagaatatgtggtatctgtacacaatgaaacactgcaagaatgaaaccatgtcattcacagcaacatggatggaactggaggtcattatgttaagtgaaataaccctggcacagaaagacaaaaatcgcatgttcttactcttgtgggagctaaaaaaattgataataaacatagaatagaatgatagatactagtggctgggaaaggtgtgtgggtagagggggagataaagagagggtggttaatgggtacaaacatccagttagatagaaggactacgttatatcatttgacagcagaatagagtgactgtagttaacaacgatgtgttgtatatttcaaagtaccaagaagaaagggcttgaattgttcccaatacatagacaaatgacaaatactcaaagtaatggatgcctcaaataccctgacttgatcattatgcattctatgccagtaaaatatcacattacctcataaatatgtaaaatattatatatcaataataaataaatactatgcctccaagttgaaacctcagcctatgggcatttcctttccctaactgtttgcatccttcctttttttttttttttttttttttttttttttttttgagagggagcctcattctgtcacccaggctgtgagtgcagtggcgtgatcttggctcactgcaacctccgcctcccgggttcaaactattctcctgcctcagcctcccgagtagctgggactacaggtgtacaccaccaggcccagataatttttgtatttttttagtagagacgaggcttcaccacattggtcaggctggtctcgagctcctgacctcaagtgatccactcgccttggcctcccaaagtgctaggattacattcgtgagccttgtattctccttttgttcttgacctctagccattctttttatttactggttttgctattttattaattatgtttttataattaatactaagagaaataaccttggttaactgaaagtttaagtattagaaaatcctatttatacaatattgcatattaaattggcaagcacctgttttcctctgattaatgttaatttataccactttttatttgattataaaagtatatgtgttgagttttttggtatttaaaaagccatactttaccacatggagttaacatctgttagcattctgatgtatttccttgtggtcatatatgagtatatatgagggtttatccatcattttaacgcaattactttgtgcctagaaatgttacagattttaactagtttaatccttatagcaatcccttcaatcccttaaggtaggtaccattattatacccatttcaatgatgaagaaactgaggcacacattcatacagctagtagatgagggagccaggattgaaactcaagaagttggctccagagtctgtgtttttaagcatcgcactgtaattttacttaatttatatattttatagagaggaagtaattctgtatgatctccattcttctgccatattctttcattgccattttctgatcatttcctttcttttccattctccacgggttaataaaaagatccacgctcacaaatactttaaagtatttgagtagatgttgtcatgtgtgtctccagttggctgttgtctttttgaacaaaatttcctggaaggtgttggtcctgtgtttttgtcatacatcgataatagattaagaagaagtatcttattttctggactggctctaactttattatccgcatgtggtctagttatttggacacagtttcacaatgctttggagttgccaagaaaaagggataagttaaagcagtttatctaaatgagtgggatcgtggcttttaggaacggctctagaaaaatgataaaggctacagatttcgtcttctgcatctttccaaatctctggtctacttaacttgccttggtgacagccattctattcgatttaattgagattaaatgtgataacatactcctaagcgactcataaaccataaataaaaaatagtactattatgaatattaattactcctcagacaccaggtatattcattcatattttcttctccctgactccccctctgaattcccatgtcttacccattaaaacctattttcagaaaatgatatactcatttaacccaagtgataggtaaagtttaatgtgtacttctcctgggttatttgcattttattagtgtgaaaatccataagcctgaggtggtagaacatcggccataagctctgagctgtgaggaaggaactttgaggggccaaggggagcattctcacacctttcaaaccatatcacatcagtgcccacttccagaaaggtcaggcctgttagacacaggtattcataaagagactgatctacctgcctgaatggagccagccccggaagtcatcagtctcttggatgcccatgtggaatatcaatatacgcttaaaagctttgcttgcaggtataaagaaaataccaacttggtttaagggatatttaagaaataggacggtgagactaaggatggattgtttctttacattgtactttttaaaattacaaaggtactctatacacatcaagaaaaatttggaaagcccacagtacaaacaagaaaagaaaaagtatccataatcctatgactcagagataatcactatcagaaatttggtttatatactttctgtatttctcttgtggttgcgtgtgtgtgtgtgtgtgtgtatcaaggttctatcttttatttttttatttttttgttttttgagacagagtgcaatctcagctcactgcaacctcccccgtcctgggttctagcgattctcatgactcagcctcccgagtagctgggattacaggaatacgccaccacgcttggctaattttttgtatttttagtagagacggggtttcactatgttggccaggctggtctcgaacttgtggcctcaagtaatccacccactgaggcctcccaaagtgttgagattacaggcatgagccaccacgcccggcctctctcttttcttttaaaccatgcgcagataaaaacatgctacagttttatgagctgcttttttcccttaaaactatctttccaatattttcgtgtgtttaaatattcttcttcagagtaatttttctaatgactggctaatactctcttctgtggctgtaccaaatttaccaacacaattctaaattgctcaatataaagattatttcacaatctttattatatcgagcattatggctaatatcctttttatacctttacaaatatctcagattctttctacaggataaatgcctaaaggtggaattgtcatgttaaagaatgtttacattcgtaagccttttcaagtgtattgccaaacttacctctagaaaattgcaccagaaattgggtgtgccatccaaaccgtatttgagctaggcatggtgtggctcatgcctataatcccaattctttgggaaactgaggcaggaggatcacttgagcccaagaggtcaaggctgcagtgatccataatccacccccccccgcactccaatctgtgtgacagagcaagaccctgaccctaaatttaaaaaaaaaaaaaaaatcaccatatttgaagcaggacatctctgaagtcacgtatttgctactataaaagcagcttccccccaccaatgaataaaaatatgttttaaatattcctctaaggtcatattaaatgaatttgaattgatacttttttttagacaggcctgagttgatacatgtttagtaatgtgctttcaggttactataaataataatagggtggctcctaaagcttagaaattacaaagaaaagaaaaataaggaggaactactaattgcacccgccagcgtaaacatgcttactgtctctgtttatcttattctctctctctctctgtctcgcacgtgtgtgcactctctctctctctctctctcacacacacacacacacacacacacacacacacacactcccctttggaaattatttggaaattacattaccagctgtctgttgtttatcagaagacagaggcagccttttactaaaaaaaagaattcactgtttcttcctggtggcccaatctctacatgttaaagaaattttttcttttatcttagatctaagagaaaatgagaagagaaaagcattgtgaaatatgacccttctccgctgatagacactaacttgtccttacttctagttttaatacactgctactcctaattgacttctacaacttaaaccaagaaaaaggagaaattctaatagtgtgacttcaaatatgtatataatttacaataaaattatcatttaaattatttaaattatatactaatttatagttatatatgtataattggtaggtatattgtcagtctcttcatatgtctgtgattaagaaagtactaaagtattcattggttggcatagtagtctgaaaattgtccttttcttttgaagagtttaaagatttgttgggcgtggtggctcacacctgtaatcccatcactttgggaggctgaggtgggcagatcacttgaggtcaggagttcaagaccagcctggccaacctggtgaaacccccatctgtactaaaaatacaaaaattagctgggcgtggtggcactcgcctgtaatcccagctgcttaggaggctgaggcaggagaatggcttgaaccctggaggtggaggttgcagtgagctgagatcatgccactgcagtccagcctgggtgatagagagagactctgtctcaaaaaaagaatttaaagatttttcctgaccattatttcaattctctggtcttctgttctaaattctacttttctcaccaagaaagatcactatatatttgggtaaagggagaaatcattctataacagtaaaaagaatccatggttttcttaatattttacaagttccagaggtcccttaaaagaatattttccaagccaggttctttaaaacattaatgttatattaggttttgataactgtcccttgaaaaaaatagtactgattaataagattggaaaaacactaggtttcaaagataagcaagtttatttcttgttagaattcttggaatttttattatacactgagactctaagaggataaggagtctatagttctccagttttaggtgactgtggaagcctttttcaggcacaccagttaatttcacactaaactttatgccatggatcacagtgaatctttgccttaatgtggtatttgccagatgctttaatgacaaaaaatttctgctaaaggttgtagaaacgtgatccaattaaaaagaaaatgagtatttatgaggcaaaagggtcaagtccctctctttactgaagttcccagccccactcccacccaggagccctcttgtgctgtggagtttcctaactggagataagcttagaaagtatctataccagtagtttccaaactctgaggtgtggctcattagcaaatcctaaaatcagtttaatgacttacaaccaacaatttttgactggtatggaatggaatggaatggaacagattagaaaatatcagagtgcattacctaagcaaggttaagtgttgttttggcggtggttaatttgttagatatgtgtgtacatgcgtgtgtgtgtgtgtgtgtgtgtgtgtgtgcgcgcgcgcacgcacgcgcgcacgccagatcacagtgtaaaacgtttttcttctgtgggttgcagtcgaaatagtttgagaaacattgaatcattcgagccctttccttattttacagataatgaaataggtgcagaacgatcaaatgacataaccaaggtcacaaagatagttataatactgggactggaacccagtttctggacatccaagccacacatcacactgccttacccgttaagaagaaatgcccaggccaataactgtctagtctatctgctattgccaacgattattctctcgtatattcctcttcgtttggccatcctaagttgatttacataacctaaatttttctctcaacacctctgggctaaaaactgccttatcaaaatggtatcgatagcggttaagagtaaaagctgtaaaatgaaactgactgggttcaaatattgactcagacactttatgcttttttctttctctttattcttcatctttaaaatagggataatagtaacatatttggtcaattgtaagacacacttttccacccacgtttcaacagttctgaaatcagaatgcaccatacgaccaatgggatattgaattcggtgaaatatggctgtattatttcatagggttacagtgaagatcaaacagttaatatttgtaaaacccttagagtagtgcctggaacatagtaagtgctattcaagtgtttgctattagctttagcattagtatcattattactatcagcttgatagtataacttaatgcatgcctgttagagtcaaactagtcatgaaagtttcattcattctcttgcatttaatggtcagtataagtagttcctctcctttctgaagatgatttccaaggatctaatctgaaagtccagtgttttgcacattagaacggctcaatagttgtttgtataactaacgagtgataaataatcaaaaagatagaccttaatctctaaaatgtcaggatagtattagtcttgttgacagttatattctacagtacctaatgtggtatgtggtacttggtagatgttcagtaaatatttacagaatgaattatgtcttatacccaaaagaagaagaggtaaattcactcttgacattgataatacacagaggcatgagatttagcatagtggctatcacatagtagacactcaataaataatgtgaccttttctgttgcttctcagcaaagactaatagcattcataactttatatggtcgtttttatcaaagtcgactgtaccatgtaatacattaagggaaaaggctgacttcaaaattacagcatgatcacaactatattacaaaataaaataaaaataacagaaatgtacacataaaggaaaaatggaaaataaaaagataccaaaagacaaacagttattgcatcatttctttctttttacttttacaaattttctggtaatagcatgtactacctttgtaatggaaaaaaaacaataaaggtaacattttatactccagcttttaaccagtgacctcttgcagtggcaatgggactctgaaagacaaatttcctttttactatttattctgaatttaaaagctgtttcattgagtgaccttctcagattatgagacactgtaaaaagaaataactgatccattatttcttgcaggctttacaatcttaactgccttaatcatatccctggttaagtctttttctctcttgtcaaagtgactcaagcttttacagtttctccttgatacatagggcctagcagtttgtttctatcttgagagttgccaagctttcatcctggacattccccactacacatacacacttaattttaaaaaataggggaaacctttaagcacatctaataattgctgacatttcacttaacagtgctccaacctatgctaccagtgtcctcaggggacagacaatttgaaatatgagtggggcaataatttaaagcttcagattggcttaaataagccatcatgaggccgggtgcggtggctcacgccagtaatcccagcactttgggaggccgaggcgggcagatcacctgaggtcaggagttcaagaccagcctgaccaacatggagaaaccctgtctctactaaaaatacaaaattagctgggcgtggtggcatgcatctgtaatcccagctactcgagaggctgaggcaggagaatcacttgaacccaggaggcagaggttgcagtgagccgagattgcgccattgcactccagcctgggcaacaagagtgaaactgcatctcaaaaaaataaaaacatcaaaataagccatcatgataaaagtcagaaagaattttgcaggtccaatgtgagatgatttgcaggctaaaattctctttcaagtaaaatctcagggtgaaatgatttgagccagtttcttcagcagtcacatgttgtcccaagtgttaggaatttgggacaaatgccatgtgacctaccagtgatgctgataatgcccctataaattcaaagacagcctttccaatgcccataaaaagcagctacagcagtaataattatattctcttcttaaaatgtgttgtcatggcccttttctcctttagctcaaatgtatactccccaataagctctcagatttatttgctttacagtatcattagcaaccagattttgcatcgttggccctatatatcccatcaatttgaacacatgaggaaacagaacgtttttgtttctgctatgggaatttctgtgctggggctggcttacaatggctcaagagagccaattgtaaaatatacaggaattgtgagctagttattaagcctacctttggtagcttgaaatcaggcatagtgggaagatttactccatggaaattggcaaatactacaaattggggcactttgttttttttttttttttttttttgtgcatagatggtttcccagaaatgactaatttatctatgttatttggatcactcaagtccctgtaggcaaagaatcttcataaacttagcaggaaggatgctcaggatccaaatatttatgtgcgttgcagagtgaccactcatcctggtttgtctgggactttcccggatttagcactggaattcccattttccaggaaatctctgtagtcccaggcaaaccaagatagttgctcaccctagccttaggtaaaatccctagaagtagagccctatttagatagatggggcttcttgtagaagtaatttgttcaggtgaaagggagtgagggaagcaggataaagtaagaaggatgctggtcaaggagttaagtgggaaggaagagactcacttcagcttgatcccacagggagctctggagaacaaattgtccctactttgagataaggggcctgggctttttgtttgtttgttttgagatggagtcttgttctgtcacccaaactggagtgcaatggcgtgatcttggctcactgcaacctccgcctcccaggttcaagctattctcctgcctcagcctcccgagtagctgggactaccgcgcctggatttttttttttttttttttttttgtatttttactagagacggggtttcactaggttggccaggctggtctcgaactcctgatctcctgatccgcctgcctcggtctccaaaagtgctgggattacaggcgtgagccaccgcgcccagccagggctgggcttttattttcccgtgtgaattagtcattggctgtggatttctggggagtaggagatagcaaagcagttcccatttggccaagggaggatttctggtgaaaggaccaatgaggccttagcaaccaacactcacaacaactgcggctgggtgaaccagctcagtaaaagggatctgagtggaacaacaatagtattaacctctcctagactttatgaagctgctatcataccccatgcataatctggctttagagctgaatgggcgcatttagctggatcactaaccaccactccttcgtcacggacttacatggaaattagcccggtggcatggaagagatgagacaaatgtctgtttctttcttatttcatcttcctcattgtgacagattcttctgggcctcatgaggagctagggccaagagaccagcaccagagttctgaatcagttttataacatgggcactattttggtggaatgctggctctgaagggtgtatttttacactacccagaaaatgaaggcatttgtgaatttggcctggggtagcattttgtcatctgtccaaaatacaaagctttgcacaacagaaatagtgggatcacatccctgtgggcaagaatcattactttcgtttttccatttggatgttttccattttcagaacacaaccagtttgggattacaaagtactttctggtgagaactttgaagtgaggacaaaaggcattttgttctttagtagacttacataaactgttcctggtttaaaaaccattctagatttttaaatagactttcagatatctgcagtaaaaatcatcttgatttcaggcgactgcaggtactgctctgttatgtgctatgtctccttaaggctgtaagggacagggataggcttaggtgataaggaacattttcaggatacagagaggcatgaagaataacatgggccgggcgcggtggctcacacctataatcccagcactttgggaggctgaggcgggcggatcacgaggtcaggagttggagaccaacctggccaacatggtgaaaccctgtctctactaaagacacaaaaaattagccaggcatggtggcgcacacctgtaatcccagctactcaggaggctgaggcaggagaatcgcttgaacccaggagacggaggttgcagtgagccaagatcacaccattgcacaccagcctaggcaacagggcgagactccatctcaaaaaaaaaaaaaaagaaagaaagaaaagaataacatggaacaacagacaccacgaaacatgtttgcttctttctgtatatgcatttgctgccatagacttcagactattacagtatcatatcttctctcttctctccacctaacaccttctacttatagtttctactttcttatgacttccattttcttcctttgttatccgactttttaaacttccccacccatctgtcatctctgtttatctctgtgtattacattcaagctctccaagacaaagcatctgattggattagttatttattatccatctaagggtaatgccatctcacaggccacaggccagactgtaaactaggctttcttgacctgggcactattggcatttggggccagataattagtggaatgctggctctgaaaagtgtatttttacactactcagaaaatgaaggcatttgtgagtttggcctggggtagcattttgtcatctgtcctagaatacaaagctttgcgcaacagaaatggtgggatcacacctctgtgggcaaaaattattgggggctgtcctgtgcattatctctggcctctactcactacatgccagtagcactcccctcccttagctgtgacaaccaaaaatgtctccagacattgtctgtctgatgtcccctgttgggtgaaattgcccctagttgagaatcactcctttataccaatgcctgcacaatttgtggtaatgaaagtcatgtggaacactaaatacagtgacctatgcctgaggaattatttgaagttgcttttctgcatccttagggaccctttagtctctcgatgaaagggagtgtcctcagcagacaatcttcaggaattgcatcagctgcctcacccaagatcataccccttacaggggcagctcttcctgatcagtgtaggggaataatgacctggccattttggcccaactcaggagaacattaacattctagctcaagagctcccatggggttgaatgagactgtcactgggtctgcattcaccttgacttctccctatttctattcctgtttctttcacttcccttccacagttgtctatcctgctctctaatcattgccttagagttggcttcctggaggaagccaatctgtgagggggcaatgaaattgacaggcatttagaagcatctaagaaaaaggtattataataggcccattacagtcactgggtaatttgatttactcttgctttcataatgaggttgattattttgttcaggataagtagtgattattattatttaaggtgtccaacctcatgatctccattaataggtaaggactttggggacagcataaaattacatgaatctcttaccttaaaccttaagctcagcagcatacatgcccatgacaggcaagagttagaacgtaagatggtcagtaacatagatcttgaaaggaaatatgttggagtgtgagcactttaagggcatagggcctgcattacttttttattaaaaataattttgcatctaacacaacatcttgcatattagatgcaggatatgccttgattgaatgaataactgggcacttaaaagattgttcccagtctaataaaatgaaagaacttagcctggtgcttagtctaatgtccagaaagagttaatgaacttcactttatcttcagtcagttaagaattgattcactttgttactcaacaaatgtctgttgaatgaccaatgtaaatcaaactctgatctaggaactggggaaacggcagtaaataaaacaaagtttatttattgtggagcttacattttaacaagagaagatggacaatcaggtcatgataagtttgatttaaaaacaaagaataaagcaggctaaaggggctagaggatgggagaaggggacccttttagtggagtggtcaggaatggtgacatttcagtagagatgtgaggaagtacaccagtcagatattgggggacaaagtgttccaggtggaggaaacagtaaaagtaaaggatccaagatggagcatgcttagagggtttgagaaatattaatagcaaggaagccagtatgactgaagccaaggaagaaagatggtgaatgataggaggtcagtgagtgaccaagggccagacgaggaagggtcttatcaactatggttggctatcgttaaaagcctttggcatatatgctttgtgagaagggaagtcatagaattctgagctaagaagtgacatggtgcctgtagcattgttacttactgtgcctgtagtattcattcattcattcctatatttattaacaaaaacgagtcacctgaaatatgaagataaaaagagaattattgccttgggacatttaaataccaatcacaaaagacagacctataaaaaatgacctcctacagtggtagtaaatagtgggtgcaatgggagtagaatggaagggaggaatccattccacagtgagagaaaggagatgttctatctagttgagtattaacgcatattgtccctgaggctacatgcaaatccaaagtagagggtattccttttgataggaacttagcaaagaatgtttataattgcttggtccctgatctcacctagcaagagtcacaagatgcattcagtgatgaaaaatcagtttctcccttctacttagccattctgataagatgaatatctcgggccgggcgcggtggctcacgcctgtgatcccagcactttgggaggccaaggtgggtggatcacctgaggtcaggagttcaagaccagcctgaccaacatggtgaaaccccgtctctactgaaaaatacaaaagttagctgggcatggtgacaggcacctgtaatcccagctacttgggaggctgaggcaggagaattgcttgaacccaggaggcggaggttgcagtgagccgagatcgcgccattgcgctccagcctgggtgacggagcaagactctgtatccaaaaaaaaaaaaaaagatgaatatctccctttccagtttcgtgtgtagtctccttaccgcccttctgttcagaaaagggatttcttacgtatgtataatgaatataaatataggttttagagagcactaatgttttaatgagatagaaataggcagacgagagagaataattgaaggattagtcaacatgagggcaatttgatagggaaagaaaaagtctgagcaggaaatgtctgtggaaaaaaaaaatcgaagaggaatggaatgaaatgagctcatttatggtgtgagttagggacagaagggatttattctcaggaggtgaaaagtgaaggagttcatgttatagaattcgacctagaccagctatcaagggaaagaaagtaattcaaaagacttggtccaggagatctggagcagatacatctattagaggaagattcagttttgaactgcatcttcagttattcctggaacccaacacaaaagctcatgacaaccttgttatcttcaggcaaaaaaaaaaaaaaaaaaaaaaaaaaggcgggggcagcaaggcttatgtcttaaacaagacagcacataacttcaggtcagagaattccattaacatgaatcacccacaccaatttaaataggaaaaaaaatagtaagcttggttatgtaaaaatttagtttaaaaatcagaaccaacaattgaaattaaacaagaatgttttatttatttctaaaaatatttagctatttattttgaattctgaagcaatactaatatagtatataatgataaaacacagttgattttcatagtaaacatcagcatcagaatgccaagaggaagatttgtctccgttcatgttttattactctgagaaccgcgtaacattttttaaagagtcagaaaatggctagaaaaagaggaagaaagattatttccttaactagttccctggtcccatgctttggtggttaacagtcagtttaactctagaaccatggaaagtctctgtcactttcctggttaccctgggattcctcacattggcagtaagttcgtgaatgagataaatatcctgataactagctacattaatgatgaaaataattataaacgtaggagttggaatttttaaaaagtatcgagcgctctgtgctcttaacacagaggaagcattttgcatagattaacccgtttaatcctcacaccaacctttaaaataaggactgttattgtctccatttcacagaagagaaaactgagactagaacaatttactaacatattcaagttcatacttgtaactattatggattatcagccttagaaaaggggttccagacaccagtgaatagcaacccacacgtctcaactgcacagaccaaagaggatgataatccccattaatctttgcatgttagtagaggcagtggctagtaacaaatgggagagactttggctggaggatattttttattctttaatctttatgatactgtttcccctctccccttctctctctactcctctctctgtcagctgtatccacaataatgccacaatataactactatacaagaatataaagcttctgttctcatgcttatgggtctacaggtcaactgtaattcgggtgatctggataaaacttgactggaaagctctacttcatactgaagcatgcctgggttcgcctctaggctgtgagttcagtttagatggtttctaaatgtgttgggttgtgagccccagactaaaggatcagaagcaacctggggcatgttctcatggcagattgccagtgtgacaagcctctgttcacatcatatctgctaaagcaagtcacatggtcaagcaagccaaggtcaaggagctaggaagcacactgcgctcaccatgaggccatggctaaggtatacatgtttagttctttcacaactgagtgaaaaatgggccccaaattcaatctctcctatactctttttgcgttaattgctagttctttctcactcttctcgctttctaatggatgtacatcccatctatgatcatttggtttttaatatctgagttgctccctactgtctcaggtttcaaattttactttccttgaaatttccctggtgcctaatacaatacctttcacacagagagcgttcagcaaatggtgtggactgcctgtcgtcttttaaaagtacatctgcagagacagtaaaggcacctggcgatattgcattgacttgttagtaacctgacttaacccagatggcccaaagactgtaaccaccattacctggaggaaagttccctggtaatgcagtcagccaattatgttcgaatttactcgaaaattccttgagcataaattattcatggctctatttatgtaggtatctatcttcctatatctgaccttaggaagcttgattgctttcttactcttctaataatcaccgtgatgtttttgaagttttctataagtcggttagaagcagcttttttttctttttttttttcatgagtaatgccgcccaactttggctattagactttgtgtgactgtgcagccatcagcactggatattagatatagttttatctctgcaactcagtcaccttgccaagaattttagtatgaactcttgacttcccagatcaaatgtgagcctgatactctaaatgacttggcaatctactgacaaatcccatggtgtggtattctgttcaccatgtgcaatggtctcagagctcagcattatctgtctgacagctcatataatatttacaggttgttattcgttaggaattttagttagccataaagattttcacagctatggcagacattagaggtctcattcatcactcttgtgaccttcctctctggaatgtagcccatctgtctctgctgttgaaatctttatggaaagtctgcccatctttgaaagtttagtaagtgatcttaaagttttcattgaatctttacttttgatatacgatatagacatataaagcactatccttattttaatttaacgttttgaaaagtgttaaatttaacttggcctttcatttaaatgacagaaaacttactcttgctacaggaactatatgcgtcacatcaaaagaaaatagaaatcatacagaaaaaaattggaatgggaaaaattacacatatatacatatatattcaacactaataactacatgaaagcttaaatactgtattataatcctgattatgactttaggaaatgaaaacgatagaaatacattttgcatataatttaacgttataaagaaaccctaagcaaattcagtaatgaagtgaactgaataggctgggttacagagcacaagagagggatgaccaacaatcagatgttgcccctttccatttctgttttcctctttttatacacaacttctcaaatgcttgcttcccctccgtctactccctccttcagcctctgatcactagtgtgaaattgcccttttgaggtcaccagtgatcgtgggatcaaatacatcttcttcttctacacccttagtctgtcaggctcaagaattgcttatacttcaccagctaggctgttcttgtgtttcatcccactttattctagcttctgtattatttttctttgacagcagttctactgccaccgccatttgggggcatttgccagggtacattcccttttgttttcctccactgtactcatctttttttttttttgtacttttatagctttcttggggtataattatatgcaaaaatatgcatatttaatatatgtaatttggtaagtttggacatatgtatacacccaagatactattgccacagtcaaactaaagataacgaacatattcattacctacaaaagttttgtgtccctttgcttttgtgtgtgtctgtgcatggcaagaacacaacatgagatggaccctcttttttttttttttttttttttttttttttgagatggaatcttgctctgtcgccaggctggagtgcagtggcacgatctcagctgactgcaacctccacctcccaggttcaagcgattctcctgcctcagcctcccgagtagctgggactataggtgcgcgccacctcgcccagctaatttttgtatttttagtagagatggggtttcaccacatcggccaggatggtctcgatctcttgacctcgtgatctgctcaccttggcctcccaaagtgctgggattacaggggtgagccaccgcgcccggccgaggtggaccctcttaatccccttaagttttaagtgcactacacagtattgttaactataggcactatgttgtacagcagatctctagaacttactcatcttgcataagtgaaactttatactcattgaataacaatttctcgtttcccctgccctgtcttctggcaaccacttttctatttactgcttctatgaggttgactatttcagacacttcataaaagtggagtcatacagcatttatccttctatgactggcttatttcactgagcatgtctgcaaggcccatccacattgtcaccaatggtaggaaccttcttttttttaatgctgaatggtattccattgtatgaaaatgtggtgtatacatgcagttctctttgtacgatcttccttccttaaagagtccagccattctcatagcatctgctatgattctagtacttatggtcttgtcctttcacttgcatttcagtgaaaagaaccaaacttatgctgatgcaaatacctgtacacaaatgttgataccagctttattcatgattgccaaatgctaatcagtctatgggcctctgattttcactgcataaaatatagactaatctgtttatcattcatgctgatgaatggtggataaatggtctagctaagaatgaaagatctgttgtatagatgtcattggtctaggaagacagagatgtagaaagaagtaccataagcccaggcagttagatactattcaaaggcatttctctctgccatactttatactacatgtggcacattaacagtagttaggagtggattcaaggctgcagataaatgctgcccaggtgagagagaaagaattggttccacaattaaccatcattcagacaacacatcatagctatgtgattacaaacattatttgtgtggtgattaacattttacaaagcaatttcatattgatttcctcattttatcctgacaacattttggtgagggagatatcattattcccattggaatataaggaaaataaggcttaggcaggaaaaagactagcttaagatcatgaagtgataggggagtcaggactcaaatccagttcttctgaatctgtactctggacattttctgctatatccagctccctctcaagatgctggattgggctttgaaatagaaagccaacatcctgagtgcctttctaaactctgagttttacagtctatcaggggaagaggagagtgtgagaggaatgttcccaaataatctactgtatcaagcagtatatctaacttgctttgagaattatgccaactaaatactattgacctgcagaaaattgatttttctctttacacttatatcaataaagagaggcttctgctgccataagtgtaatttatgtaaaatgtttttaaaacattcatagcctttaatcaagtaaatatacttctaggaattttgctttaaaaaagtaactaaaatatgtgcaaagatttatctacaaagatgttcactgtggccttacttagaacagtgaaaaactggagacaacttatatgttcccaaagagggaatttattcaataaatcatggtacatccataagtgggaattttttagcaatgaaaaatctgttgtaaccctacaagcccactcttaagcattcatcttagagaaatgaaaacttatgcttatgcaaacacctgtacacaaatgttgataccagctttattcatgattgccaaatgctaaaagcaacctaatgtctttgaacaggtgaatggataactaagctgtagtacacccatataatggcatactacttagcaatgaaaagaaacaaatcgttgatacagcaatatggattatgcattatgctgagtgaaataaaccagtatcaaaaggttacatactgtatttatatgacattctggaaaagacaaaacaagtctagtagatcctccctaatgccttttgttcaaccccagaggtgagttttctattttacctccagtgattgctgtatcggttatttatctaaactgtccccacttttttgacccacctatgttatcaaactccaaatccaccaagtatgagaaaagtagagagatgaatgaaggtatttgtgttggaattccagaaagtgctcttttggcatgtcttaaaataacattagcattctttttaattttctggttaggcccctatgttgattaaaatatgacttaacaccagggtgcatcacttggaacattctgttcatcatgcatttaaaaacggctgaaataacaacttcccctaaataatgtggcctgtgcttgtgattttcaaaactaccttgggcacaatattgaatcctgtcacctcaaggaaggaaaagcatttgaagatagaattgctaccctttcttgctcttaataacatactgtgtctgtaacacaaaaggaaattcagaggttggttttgcaataaataaatgcatgtgtagtttgctatctaaattcagtggacaataccccatgatgctggtgccgtatgataatggttgatttgtacattcaagaatctgaatcacaaagctgccctggaattacacgtagtggttataagcacatctgtataagaaaataccaaaggacaacccggtgtcatatagaaactatttgccgataaatttgcttttgatgggctactaaaaatggacacatcaggcataaaagatgtgtgtgtctattacgtaggctagctttatgaagaatgacaagcttccactggtacactgagataagaaacagctgttgttggcatcagtactgctacaagaaatgaaaaaattctgtggcacacttgtgagcactgccacatatttgatcaacttttgaatagatggaagaccagaatcatctggcagccccaaatgaaattgtcgacaacccttaagaatctcttgagaaggagcactgaacccaattccgtagaactatcatccaattgtgtgttatttctaaagcaagtagttccagtgtgtgtgtatgtgattatgatggggcagggaaggaatgaggggaggctgttgttattttcctttttttttttttttttattgtgtcaaggacatttttgagcataaaattgtaaggtttcaaacaatgactgcaaagcagttgcttaggtgaatttataaactgtgaatcaaaggggaaaaacatctttcagaaaaaaaatacactgaatctcaccattggacctatttgatggctacacataagacaaaaagcttttttaaggaaaataaatgaacacttaagaactgcaattacaaaagcttgaaatttcatattgatctagaatttataatatttttaaaattctttaaaaatattttcagctatttagttcaagcatattctgataacttctctgacatttaattgaaaattttccccttttaatgtaaacataaaaagtcaactctagataccctacgtaggtcttcccattagctcagccaggcaacgccaattttcctctgtctctcgctgcttagaggttgtttctttcaggccgaaagcccctaagccaggccaggcagccagcagccctctccagcacacttctttctgagagacgcctaagaatagtgtaggaaatccaaagtgattcttctgctatcagaggatggtctagcatcctccaaattagaaagaatttctggaccactagaatgataaaaaaaaaaaaaaactagaaaggtataataagagaaattgtgaggcctcagcccatagatacctttaaggaaagaatagccattcttttctcagtttaggtattcacaggcttggcattcacagccagtgagggctggaccaagagctctctggagttctcttcttccttttatgatgctggtattttaagaagaaggtacactgagcagccaggagctataatttctggctctccaccatgtttcctgctatagagggctagctttttaatatttccataacaacagactctgaccagataggtcaggaagtctagcccatggtttgtttgtttgtttgtttgtttttcagttggagttttgctcttgtcgcccaggctggagtgcagtggtgcgatttcagctcactgcatcctttgcctcctgggttcaagtgattttcctgcctcagtctcccgagtagctgggattacaggcacctgccaccatgcccggctttttttttttttttttttttggtatttttagtagagatagcgtttcctcatgttggccaggctggtcttgaactcctgaactcagatgatctgcctgcctcagcctcccaaagtgttgggattacaggcgtgagccaccacgcctggccttagcccatgtttttaaatcagatcttatttactctgtgaacttatttggacaggagagctgcatcctacagaagaaaaaaggacaagagaagagttgggaagagaatgagaaaggcaaagatggaaagggaagcagggaaggcaggaggaagggaaaagaaaggaatagagaaagaaggacagaaagaaatggaaagtcagagactacttcaaaacagcagctaaatgtcttttttctctgtattaaaaatttccgtctgccaaaatgaaaaagcataattaccggccaaatacaaatccatttcctatatcgtttaaatgacatatctccaaggtacaaaacagcatgtctggttaaaggttgggtgatttgatccctctattactctatataaaacaaagaagctggagtttcattacgcttaaattgtctggcagtgggtgaagttaacttttattagaagctgttctttcatattatacagtgtagtcgaggatatattagctttgacgttttcttacatctcaatacactgcggagtgaatttactgtgagactaatttaaaagggagtttttcataggaggaaataatggtcagcatcagctgtgcttcaaattattagcagaatgaaaattcaggggaaaaagtatagacacataaagttgctagatattaataagaatgcgtcttttatttctgtttctgataatattctgtgtttcttaaagctccagtgtcttaaaactatattcaggaggaagattatattgttgaggaaatgttatagtgcctcctcaacaagattattttgtcttaaagaaagaaaaaaaaccatcagatcaaacagtatataaaatatatttgtagaggttcagctttagggaagaaatcctacaacttaagcctgaaaaaaaaaaaaacaatgcaaagatcattcatttgaccaatacacagtgaagtcataataaaacaaattcctagtatgtgaaatgaaatttcacgtataggattcatcactcataacaaaagtcttattacgctctgatatcagtagacattccctcacttttggtcaccttttctaataagatcacactggtcagctgacattttgaggcaccaaattaagcatctatttggtaagtgaatttggattctctttaaaccaataaagataaaaacaaccatatcagagtgataagcatattactttagcttcaataacttagaatgtaaatatatcacagagggatatttcagctactgaaataataaaatccagtcagtcaaatagtaaaaaatattgagaaccagcaacaggaagtattataaaaaaaagcactcaagggagacacatacaagaaaccccgtcagtctactcattcagtttcttatctgttctataggtttagcagtggaaatgtttgtgggttttttttttcttcgcatttatctttgtgcctgaatgagttcagtttcgcttagattaggacagaaatttcagaacagcaggttaatccatcctgtcttcatgggcagctgagcaaacagaccaatatcagtgtaaaattgtaattctggagattaatgttgtctttcctgtttgcgatgaatttgacctccttgcctttctttttttcctcccttcttttcagcgtctgtccagggtccctgggagagagccatctcgccaaacaaagtgccctactatatcaagtaagttggaagtatcacatttttaaaagagcatttattgtgactaacctgtatattcacaagtgagtttatttttaaaatgcgacattagcctggcctacaatacctgtgtcttttttttcctgaggaagcttggataaaaaacttattctaaaattaccattgtaaatttgctgatgcaatggggaacgacttttaagaaaagtttatttaatgcaggatatatggtgtgttttgtgacagagggggcggatttttcacaatagaaccaaaagctccagataattttattgatagtgggagtcaatctttgcgagaacaatttcttttatttaggggttttctcacatttcttcttccgtcaaagatagaagatttccgcagttatatgtacacaactgttttgggtgaatgaatactacatgtttccaaaaggcagaaagcagcagtcctcgactcgtagggcttagttgttcattcttgatacataacactcagtatttgtcacctaacaacagaaagatactgttttctggaaacatttgtgccagtcaaaagaatacgagtgcttggaagcaccttctgtagtattttgcatgaaatataaatgacaatacattgggtcaacgtggaagagagaggagagaggatattgagtgattacgataccttcacagtctctcatccattgtgcactagagtctaacttaaatttaactttgaattggaaacctcaacaacaattacaatttactgggttcataaaatagtcctcgataccaaccgaagtctttgaacttgcttctgccatgagtctgactaaaaatattagatgttttcccatttttttccgcctgccatcttttatcgaatctgtttttattctttcactgtccatcaattcttcttaattcggttctaaagcaataacagcagtcctagatcttcattactacagtcctcaagaaatttgattttatgcctctattttgttaactcagaaaaatgggagtgaaggtagtcttttgactctttcaggagaaatacatactttaggaaacggtttaccatttgtcttattacatttttccagatgaggtatctcttaacttgaaaattcttttttagtatgtttgattctgctttttagttttcatattttatgaatttaattttattattgttatatttaattcattagtcactcaaaactgtacattttaaatacctatttaaatcacatgctttattaaataatatattgctgtagacatgcactgtatattaccttacatccactgtatattttatggaacaattttcttcaaactctagacagtgatttcctacatcagtgtctttgtcctcacaaatttttatttccgactaagatgtttgagacctgctacttcttcaaccaattcataaagctctcacttttatccaattcctttatgagctgaaataaagactctttttctcctttcatagatgaggttttaggatcactggagaattcaagacacctttaagctattattctccaaatgactacttgtttggggctcactagaggtctcacatggattgctagggtctccccggtcccattgtcctttccctatatattcatcttctccctgatgttacttctactacaagagatcccagtacattgctgtgagggaatggaaatgaactccgtccaaaaaataataaagagacaaattccagaaaagctgtaattcccttctgtgtattagtctcttgctgtttctcagtggaattagagagcagctacatatcctatttgtccaatgctccttcatgtacctaaagaccatggtgatggtattgataagggcacagatctatgaataagaaaacttcaattttagtcctccagtctagtcttagaggctctgtcattaggcgactgtatggctttaggcaagtcacttaacctataaaaatcttggtttctttctttttttttttttttttttttttttttgagatggagtttcactctgttgcccaggctggagtgcagtggcccgatctcggctcactgcaacccctgcctcccgggttcaagcaattctttcgtcttagctcccgagtagctgagactacaggcacctgccaccatgcttggctaatttttgtatttttagtagagacgaggtttcaccatattggtcaggctcgtctcgaactcctgacctcaggtgatccacccgcctcggcctcccaaagtgctgggattacaggcttgagccaccatgcccagccaaaccttggtttctaatttataaaataaagagttggactagatgatatctaagatcctttttagctctaagacgtaatgagcatgactcattcagttgtcctgtccaaacttaaaaaccgaagatctcagcttttgttcgataatatctttatttttaaaattcattattttaatgaacataatgtaaattcttactttaaaaaacaggaattttatttttccactgtttaattagctttagatatgccctatcaacccactccaatttcaccacacacctctttaaagagctcaaatcttggtatataatttaggattattatgcttcctggctcatgataagagagagagaacaataggcaggaaaatttgccaaaaggtgagtatggagaccttaaaagcctctgaaataatcagttccttgaaatgaggaaattacgtaatttctcaaaaatatctctgaaaccttatggagagcaattctctctacaattataatctctttgaaattagggatggtataatttctcaaatatgagtgtaaaatgttaaactgtaatatagggaaaacatacatgtttataaaatgaacattgtcagtaagcagatgattaatggcacttgtgtcttattagccattactattatctaaaatgttctatggaaaccaaattaatttgatgtacaaggttcggtggactttatgcacagcttaatgccgttcataatctgagatgccgtcttggtctaaaaagaacaaaaatacgtttacagtgacagtgcttcaaccagtcctcatttttcctcttttttatcttgtttgtcttgacttccagtcaagagtttttaccacagatgcccagctgcaaaaccaggtgtcttctctggctatgtttttaatgctttgtaactttttcttttcaatgctgggataaagggatcgcccacataacaagaggtttctataccagtggcacagttcctgttggttgttgaattgtgcactcattcttgagattttaagtcattaacatcttttgctctagtttgcaaatcaggcagtgtttatgcctgcatcctgacatcagcttttcatatgaggctaagaaccttgattttgatacttcaaactacgtgtttgtctagtttatttgtccacagcatacatcattgttacagttttcatattccctctcccttggggctcccttattcctgccagcatctctttcaggttatttgattacagctttcattgccactgaaaaaataatcaccaacaatgttcaacctgttacaactgccttttctactctctgccattttgtagttttttggcctactgtcaaactcatgaaaatttcaatataatagcctttaaccagctgctgcattctgttaggatttctttcacctttttatgttgcatgctcccatatgggtaaaccaaacagagccaagagctgggactctcttgctttcttaatgagttagaaaattgttcttctgtattctggactgtcaaaagaatttaggaatcccaaacatgcatgcaggatgttccagtatagatgtcataataaaagcataagaaatatcacactgggtcagaccaacagggcaactagcccggaactctgtcccagatgaagataccaatggttgttttgtcaggtaacctagtacattttaccttaaaaattcggatacatcatgaccacttcttaataatgcattgtaaatcaactggcagtgagtttatccaatggtgtcaaacttttcctattccccacttcagctttgtcttaataataatatgttccataaatgtaccgacttctatataaatataggcattttaatttctcttgaatctgcatcctttaacctcaaggaatggccttaattaaattctttgaaattcagtaaaaacatttatatttatccagagtcgactttagcctcacattcccctactaatgcttttcattttcatcttcccagtctgagaaattctaatcctttttagtcttttagtctgtccttgacggaaagataagctttccccttgattatcttagttgtttttccctggatcttttccagctctgttatatcttctttgggatgtcgtgactagggtggcccaaatattggttatgaaatttgttagcattgtctctagtttccactcactcatgaagaaagtaaatgttatttgctgtctcccattggtgcagaaatggagagatcaattgaggtcataacctcttctgcatatattagttctagccgaaggttggttttctgctacttttctgtaataccagcaaaagtgtttgaccttatatttctgccagctgtcccttaggaaggatttgatttttagacaagctggtcctttcctccttcaaagacgctgtggttgctaaatattgggaagaattcactaatgaaactcaggagtaaacctgctgactccatcagcagtaatgcatttcatcaggttccctttcgaaatatctctgaagcccttcacagaagagtgaaagatggggttcttgggaacttgctaactgctcagctttttttacatgcaatgctcaagaagcaactcatgtccaaaggagtgtttatcttttcctgctggtaattttgaatgttgtatatacattgctgtatatgttgcctgatgaccttgatcgacccttctcttcactctcaatctcaggcatgtttccacaaccatttattgcatctgagttttgctcacaactttctgctgcttcctgcttagcaaaatgcgatataaaaccttattggatgaagttaacagttgcttcagtcaacatttcttgttactgttgctgtttgtgctgacaaaattgctgatttgggttctgactgtcctgtcttcttatggcctaccattcctatagctctatttgtacgagtatttgactctctgcctggaactgtggccatctgtctagatttaccttttggtatatgtggctctctgtatcctgttggtctacattctggtttgaactcacggatcttggtctggtttttagtaccagtgttcccctaactccagtagcatctgaatcttgacaccaccttcccctgccccctactgtattgcctctattactactttcatggcaattttttcggattccaaatatgtcccatgcttaaagcatatcttgctctcattcttgttctagcccctgttggtaccaggcattgctccaattcaagttttggttggttgatttcttccttcataatattgattgctatttcagtacctgtatttatatacagagggagcagtgcctaactacatcttagccttaacagcaatcaacgtgttaaatatccctgtgttggctggtttgcagtagacacgtcttctgacaatgagatgggctcttattataaagaaactggagtatgatatcaacatagaaaacatttcctcaggccgggtgcggtggctcacgcctgtaatcccagcactttgggaggctgaggcaggcagatcacgaggtcaggagatggagaccatcctggctaacatggtgaaaccccgtctctactaaaaatacaaaaaattagctgggcgtggtggcgggcgcctgtagtcccagctacttgggaggctgaggcaggagaatggcgtaaacccgggaagcggagcatgcagtggacgagatcgcgccactgcactccagcctgggtgacagagcaagactctgcctcaaaaaaaaaaaaaaaaaaaaatttcctcatttcttattccagacacctcactcttctaagaatgatacaagtcttctgacattgggtttgaaaatcagttgaattttgtcataatctttcatacaatgtgaacacatcatgtagtatataattttgtgctatttctggtaagatccttcttatgtatatttttcttcaaaatataccttttagcagctaagacaacattaaataggggaaattttaaataggctaggcatcgcaagacttgaattctagttccagctttactgtcacctagctattaatacttgaccaatgggaaattgcttattttctgtgggcctcagtttctccctctgtcatttaaggaagcagaatgacatgatatcataggtcatttccagtactaacattttctgattttgtgaatgttgacttcgaaatagaaattgtttgtgatcattttccagagaagtgaaaatgaatcttcatattgcccttgaggattcttattgcaccatcaatcttatcgggatagaaaggacaaataatattaaatgtttcacttaactatttagcactattgatgataagaagtggatgcaacagagaatcagctgtctaatttgatctgtcagtctttgaggatgctggtgaatgattcggggtaattaaatttttgaaatcactgccaaaagcctgatgctctgacttttcaaaaggctttagtacacaaagataacccagaggtcaatcttctctgctgtgttttctcctctgccatttgatggtttcaaaggtcacgttacctgagtctcagtaagctctggaaccacaatgaaggaatagttggtaatacattattgatgatataatcatgaaaacaattcaggttaagatattaactgaaagagagtgaaaggggtgccatagtgttgtgcagagtgctgagtctggttttggttttatagatcttgttgggagatgtagatgttgatatcatctgtgtctcataggttcatgaaaaaaaccctcacatccttttttgtagtttcataagctgatttgtatcaccttgactgaaataacagactccaggaggatagctgttgttatctctttttctagcatagtgcctcacagataacaggtacttggtaaatattggaatgaattcatgaacatatgtcagtaattctatgtgcttttcagtttgctgactcatttcaccttcaaaacaatcttgtagtatttgtgtgtcaatttagatttaccactcaaatccatctctcatgccctctagacatgaactttagtgttaggaagcatgccgagtgtttgatagagtttctcatagctcctacagtttggtgcttaagggacagtccttggcatggatgtatgaatggtacataccaaaacatgagttctagattccgttctatcttaatctaacaatatgataaggagtataacttagctcaacctcaatgagaaggttgaactagataatgcctgggaccactctcagctctagctttgtttcagtagaactagagtctgtttttcctaaatatcattcatgaggcttcttctggttttctagtggtcaatagagctttaaattgatcaactactgtttttcactgagcattgtggacaggacctactttttgggccaggatatagtagccactgagtcttaacagaatgtcatcaatgatacatttttattttacagaaaaatgttgtaacattctatatggcatatgtcatgtggaaaggtggcaacatatatacatacacctatacatgtggcagctaaaatttaatgtgtgtatggggaaaataatcctgtattataatacacatggtatagcattccctgcctcattcgtggcacttttggaaatgtgagaatgagcatagaacatattcaagttggtttatccaaaagaagaggagtaaattatttcagctatttccccattttctttttctaactttcttaaacatgcactttcttacataatcacgtgttagaaaaaaaccagtagtcacatcaaataaatctgcatttgaaacaactgtatcatatcccaactctgttcgtttgagccatttgcttaacgtgacacccattctactttatgacacataaggaatattgcttaagaaatgttaattggctttccttttctcctctgaaactggattgaagtcttattgacctctattagatactgagtgttcaggtttttaggaaaacactcatagagatatagccccagtgtgagctgcatttttagaatattttctagaacccaaatatgtccctaatcaaagttagtttattttcattcttagcgttcccacgtaatttggggtatgtgtgaattcccaaacattcccgggcctctcctaggcttctctaattgcttcttattctgttcccctgggaagcagcatcctgttcccttcacaaaggtcagcagcaacagcccaggcaatgttttaaaataacttaataaccctgaactgcctctctcttctttgggataatttccttagagcattagtcctttgaacactgacctggttgcagaaaatgcccctttctcagtgggaaaactccaaatcccattcagtcttcccctccttccttccaggggatagggtgggggagtagggggtagggagagggtattaaatactttcttcaggaaaaatgttaacacggtaaaacactctctctctctctctctctctctctctctctctctctgtgtatgtattcttttttaaagaaatagactgtgagtgcattgtataaatcagtgctgtcacgttgcaaattttttaaaccgttgtacaagatagaaaaacagtatctctggatattgactctggaaagcttctaagagcaggtcctagatgagacttagctcactgtcggcattcggcaaatgatcacgttttctgtgataccattaactcctggggggatgaaactgaaaagcctcgctgctcttcctgaaactctcaactgcttttttctgtttttctttctcagcttatccacatccatcttggtccccaaagccattgcatgtcagatggtcagtgcaatgtgtaatttttaacttgcttctttgttgctttagaaggaatcgttttgttgttttctttccttttggtcactatttcttgttcatgagttttctgtaaacagtgtgtctcatagataagtccatgtaatctgctagacaggaagaaaagcaaagtttaatgtgtgcctactatgtgctaaatgacaaagtgtttcatctgtatcttcccatttaatccttgtaacactccacttattatccaataaagaaaaaaacggctatcagtcgggcgtggtggctcatgcctgtaatcccagcactttggcaggccaaggtgggtggatcacttgagctcagcagttcaagaccagcctgggcaacatggcgaaaccccatctctaccaaagatacaaaacagtagctgaatgtagtggcatgcacctgtggtcccagctactcaggaggctggggcaggggaatcccttgaaccagggaggcggaggttgcagtgagccgagatcacaccactgcactccagcctgggtgacagagtgagaccccatctcaaaataaataaataaataaaagttaaaaaaaaaaaaaaggaagaaacagctgagattcaaaaaagttggaggcttatccaagtcattctaataaaggggaggggggagaattgatacttaaaatcatcatgataagaaggatagacattggagattcagaagggcagaatgctgggtgaggggtggataatgagacattacttaatgggtacaaggtgcactactttggtgatggatacactaaaagcccaggttcaccactatgcaatacatccctgtaacaaaactgcacttgtacctcagaaatttatacgaataaaaataaataaatcaaataaaataatcatcatcatctcagctattgcttctagctgtttcaactttctaatgtttttgattgaaaactggccatttgtataaccaaatgtggccaatccaccactgtgaggctgccatcttgggcatcaccaaaactactctagtagtccttccctgcactgttaggtggattttccttggcgtatcttcgcaatcaagttgcagagacctaagttactctttgctgctttgggcaataaaggggaacaaaaaacaaaatgaaacaaaaacttggccagccctgatgtaagcactcttctacctccctgcaggctgagaaaacaaagtatttcttttttttttttttaatttttaaaatgtttgattctggtctaaatcaattaaaatgagatctccccccttcttttttctttttttcttctaaaaaaaaaaaacacaccaaaaaaccgagatacatgtgcagaacgtgcaggtttgttacataggtatatgtatgccatggtggtctgctgcacctaatgacccatcgtctaagttccctcccttcaacccccaaaccccaacaggccctggtgtgcattgtttccctctctgtgtccatgtgttcttaatgttcaactctcacttgtgagtgagaacatgcagcgtttggttttctgttcctgtgttagtttgctgaggatgatggcttccagtttcatgtccctgcaaaggacgtgatctcattcctttttatggctgcgtagtattccatggtttatatgtaccacattttctttatccagtctatcattgatgggcatttgggttggttccatgtctttgctattgtaaatagtgctgcaataaacatacatatgcatgtgtctttatagtagaatgatttatattcctttgggtgtatacccagtaatgggatggctgggccaaatggtatttctggttctagatccttgaggaattgccatactgttttccacaatggttgaactaatttacattcccatcaacagttcaaaagcgttcccatttctccacagcctagccagcatctgttgtttcctgactttttaataatcaccattctgactggtgtgagatggtatctcattgtggttttcatttgcatttctctgatgatcagtgatgttgagctttttttcatatgtttgttggccatgtaaatgtcttcttttgagaagtgtctgttcatatcctttgcccactttttgatagggttgtttgtctttttcttgtgaatatgtttaagttccttgtaaattctggatattagacctttgtcagatgggtagattgaaaaaatgttttcccattctgtaggttgcctattcactttgatgatagtttcttttgctgtgcagaagctctttagtttaattagattccatttctcaattttgtcttttgttgcagttgcttttggcgtttttgtcatgaagtctttgcccatgcctatgtcttaaatggtattgcctaggtttccttctagggtttttaggatttggggttttacatttaagtctttaatccatcttgagttaatttttgtgtaagctgtaagggaggggtccagtttctgttttctgcatatggctagagagttttcccagcaccgtttactgaataggagatcctttccccattgcttgtttttgtcaggtttatcaaagatcagatgtttgtagatgtgtggtattatttctgaggtctttcatggataggaagaatcaatatcgtgaaaatggttatactgcccaaagtaatttatagattcaatgctattcccatcaaactaccatgaccttcttcacagaattaaaaaaaaaactgttttaaatttcatgtggaatcaaagaagaccccgtatagccaagacaattctaagcaaaaagaacaaagctagaggcatcacaccacctgaattcaaactatactacaaggctacagtaaccaaaacagcatggtactggtaccaaaacagacatatagaccaatggagcagaaaagcaaaggatttctaagtcatattccaccacctccatcagggcttccctaagatagagagtatggccaagaccatacttaataaatgtcatggaatgtgtttctcttcataccctcaattgtaagtctttctgaaaggtagcgcgtggtcaatttagatggacaagaagtgctctgcaggagcctttgcaacatttgtgcatgtccttgattttgacaccaccccccgccccccattccagaacagatcgtctcatccttcccttaagccagaggcctatggttctagctttactaggcaaatatatatggtctgtggctataagtcacaatttctcccaagccttgagctgggggaatactgagtctgcccatgtattacatgcagaacatttcatcttattgcagaatgatactttattcttattgcagaatgatattcattattgcagagtgatattctttagtctttattttttatcattataactacatggtgcaaaagaagtatttctcatactttttctcataatgactcaaaattacaaaagcaatctgggcaattaatatgtttttgaagataaataatggcttatgttttctgaagattaagaaaaatctctgtctgaatatagctgggcacagtgtctcaagcgtgtaatcccagcactttggggggtcaaagcagaaggaacacttaagcccaggagttcgaagccagcctgagcaacaaaatgatacctggtctctacaaaaaaaaaaaaaaaaaaatccttggcatggtggcatgtgcttgtggtcccaggcacacaggatgctgaggcaggaggattgcttgagcccagggggccgaaagttgaggctatagtgaaccgtgtttgtgccactgcactccagcttgggcaacacagcaagactctgtctctaggaataaaaaaaaaagaagaaagaaaagaaaaatctctatccgaaaaatgtaggcaccctgtgttaatatgtaaatacaagtgctttatcaaataaaggctagattaattgttttttctcgctcttacttatatcaatactacaagaacttttctgccaaaaaaaaaaatcaaataatagaaaagaatgaatcctagatagagcaggaggggctgagcaggcacagcaaaagttcaaggtggaaatatctttatgcatccaattaaaagtaatttgtgtacattttactcatatatctatatgtacacatacatacatacacagacacacacacatatatatatatatatatatggagagagagagagagagagagagagagaggacaacgaagaggaaactaaagagaataaagggtattaacagcaggtctgtgacttattccctgggggatgtgaagggaataaatgaccttaatagaccacttcataaacatgttaatgacctcccagaccttcttgtttatcttgttaatagtggttaactagaggaaagatacctgcaaatccctatctataaaatgattttagtagggtatacctggcctggctagatagcttattgtaaataaacctggaatgtttggatttatgagtcgtggctggctggagaatagggcatagctacatgaacgtttttctatttttgtaattgacagattataaaatggaaaacttttgagactgaaatgatttcctttcaatgtttctgtgtaaatttttaaaaacgtatctgttaatatgaaaccaaagcacatcataatgggaaataacatggatgttttggaaacgcatgtgtgattatttcaggttccccagggaaataatgttctatctgtgcccagcacttccctataattctttcagtcattaataaagattggtactagataagaatctgagatttgtgtgagtctgatgtgagatccaaatgttatacttacacaatttgtgtttattttagtttaaaaattatctttgccatgagcaagaggggaaaaaaaggaggatgagcgggcctacatatttttccttaacatcttgtcccaagttttaggaaatcacaagtctaagaaaaggccagggtcaggactaggaagtgatataacagttatacatgtctacctttaaaattatataagtaataattaatttttaaccttattttaagcagatcctagaaatagcaagagcctctataacgtcccagctaagaccccaagttttctttcttgtttaactcttgaaatattttgttaattttcagatcccttgtctcctcagttcagctgtaaactctctgacaacgcttgtgccttatgcatctttgcatcatccctagcatgtattatatatctcacatgtaaaaataataataaatacttgatcatttgttttgattttgatgattaagcactggaagctgagctatgatcccaataggtatgcttatttaaagaaaaatagatggcagtccaggcgtggtggctcacacctgtaatcctagcactttgggaggctgaggtgggcaaatcacctgaggtcaggagttcaagaccagcctgtccaagatggtgaaccccgtctctactaaaaatacaaaaattagtctggtgtggtggcagatgcctgtaatccccactactcaggaggctgaggcaggagaatcacttgaaccctggaggcagaggttgcagtgagccgagatcgcaccattgcacttcagccagggcgacagagttgagactccatctccaaagaaaaaaaaaatcacacacaaaaaaatagatggcacggcacagcagcttatgcctgcagtcccaacactttgggaagccgaagcaggaagatcacttgagtccaggagtttgagaccaggctgagcaatatagcaagactccatctagaaataaataaataaataaataatttttaaaaaatagacaataacagataaagaagttccatgttatttttttaaattctagatagccccactggtgttacagtttattaaattacatttggaagcgattttttagcagtccatttattttgtatatttcagtttgttgagagcagatggggttgagtgttgatggggttgattgcctggctagattatgctataaactataaatctttgaaagttactgttttgaagaaagcatctttaagtgaatatattccttcagtagctcctattaccaaaactgttgtgagaatatcttaggaaaacaccttaaaatcctcttctatcaaaactcccaagctttcttcaggagccagcattgttcagtgaatgcatgtaagcctatgtcttaatagagggatccctaacctctggaccatggactggaacagcaggaggtgagtggtgagcaagtgaacattactgcctgagctctgcctcctgtcagatcagtcgtggcattagattatcgtaggtgcacaagccctattgtgaactatgtatgcgagggatctaggttgtgacctctttatgagaaactaatgcctgatgatctgaggtggaacggtttcatctcgaaaccatacccccgcccctgcctcccagtctgtggaaaaattgtcttccagaaaactcatgcctggtgccaaaaaggctggggaccactgtcttaatagatcttgaaaaaagttggagtaaggtaagtggtaaatcctaagacatacattgaggcagagctgcagtggtatccagtagggaagaaaagacttcaagtttagaattcagttatactcaaccagtttttgcctttctctgttaaatattagatatcattaccagacacatacaaaagattttaattgcatgaatgcccgatgttgatacaagagagccgatttttttttcacacatagttttttggggtttttttggtagggagaaacatcatctcatgatatcgttttaaaggtgctttattatcaaggaccttagagctttttctctcactcatatttcatatactcttagtcctcaagccatttctttttactgaaagcactatagagtagcaaaaggcatcattatattgctcagcctcattcatcatcaacaaaattgccaattatattccaagtccttgaatgtattgtttaaaaagatgtataaggtgaaaggaagcagttcaatgttgaggtggaagatgaaacatactgactggtagattcagagcatactaatcttgttttcacttgtgaactggaaaaaattaacatggagggatggagaaaacatgttcaaactacaaagtcattttttctgagaagttatctgactgtaactgtaactgtaactataactcagggtatatcagagggctcaaatgtggaacacttctttaaaattaaaacctaaaagtcctgatgtgtaatagaacgtgtaaaaatagcagcctctgaaggatctgagatgagcagaggaacactgaataatataatctgacagtatgggccatacccttacagtagttgccgtggcctggaaactatagaattaattcagtaaaacatcagaaaaaaagcaacataaatataaaatattttaaattaaaaagactgaataagaacagaaaaaaatcccctagcaaatcaatattgcttggggaagcatgaatcccagaccagcaatattttaatccaaataacttttagttccatcgtgaacacctttatcaccaagttttataaagagtggagtgaagaaaaaaagtacttgaggttgttggaaacacttctcaaagttggtggctttattcagagattcatgcttgactgtaccaacttctgtttaatttatacgtagtactttgtcaatttaggaatttggtttacttgtcctttcctaaatatgtgtattacaaaacaaaaaatagagaaatgataaaataattacaaagatgattaagcaatagtgttggctatagtgaacagattattgccattttatagagtaataatatacctaaggaaatctgtgggaaatttaatttgggatataaaacacagaagtcaggcggagatgaaataataaaccaataggaaattaaatttaggcatgagagtccaaagatgtaaattctatagatgttataaaataatatgtatgcccttacataatttcattactctctgaacttcatttctcagtgaaatatggggaaatgatactgaacagtgcagcagctcttccgcttatgaaccaaccagaagatatataaacaactcttaagggttatacattataaagatataatttagtctggatttttttttaaatttgaaaactaattttatataaaccctaattgggcaattctccattctttgacttgaatattatagtaaatatgttttcccaatttccaagtttcatgtattattttcaaagaaaaaagacaaacttttaaatgtccagctacctgggacttcctctgattatcttttaaggtagttcaaatatatacaatttcaaacaacaacaacaacagcaaaaaatattttgccagacaatatgtcttgtttgtttttaatgttcacaatgtaaagtacacttattgccaaacctcactttcaatggtgttacaaattagccaagtataactagtttgtaaatactaataagaaggttgctgaaattcagccctgaatatttcttttctgcaactccaaagaggaaaatttttgaaatgcaaaccttgacctttatcaaagcctaggtgaagtttgttggaggtgtttggttttttgctggtgctttgttataatgcagtttgaaagtagactagattggcaagacataattggctgctgtgtggagaatgcatttggtggaacacgtgagttaggggtgaggaaatatgaagagccagagtggaagcagggagaccagatagtagtgtgggaagcactggtgttagataagatctagataaaggtagcagtggagatcacaagaggtggttggaatcagggaatatggtttagaaacaatcacaggtcttgctgatgcattggaggtcaggagggacagaaagagggcaatccaggtgtctcctcggctttcagcaggaacaggtacttaaagaggaacaaatttggtagggaaaatcaagttttagtgttccattgcagtacatggtaaccatggctaataataatgtctcatatatttcaaaattgctaaaagaatagatttttaatgttctcaccgcaaaaaataaatgatatgttggtgaggtaatggatacgttaattagcttgatcaactctttctacaatatataccaagatcaaaacatcacatcgtatcccataaatatacaaactattatttgtcaattacaaataaatgaaataaataattttttaaagagatgtcttaaagggtggcttgaagagcttctgtgctccaataatacctgcccattagccatactttgcttccagcaacaacaggaaaacatttaatctaaacaaaaaaaaattgcttgtcaactagatagctactcttccgtgtagaaaccctagagctgcctgggtttagacatgtttaagtttgaggtacttattgggtatctagctgtgcagttcaaaatttggatctgaagctaggggaagacgtcaggacaagagctttaacttttgtaatcatcaatatatacatccttcttagagtcatggggtgggatgccatcatattgggatgagggaggaaaccctgggacttcacaatatcgagctagtttctgttttgcaaaaggcaaatgtattaatgaattcattacattaattaagcaaactatatttattgggggctattgtaccagctattgtaaattttatattttatattatatatatatatatataaaatgctcacaaaataaaggaactaagtcataaatatgcatatgatttacataaaggagctaaaataaggatctctgtttctgtttcaattctttattaaagatctatctaagactataaagacatatataacaaggtacaggaggtaaagagtatattcttaggcatctaaaaatttttcctatgcttttgaaatctgtgtgatttactttcttgaattggcctgtaatataggagtacaatatcattgcagagattaattagtgtgtttgtgaactgttctcaaatgctaaaatgaaagcataaaactataaaatggcatcattattccttaaagaagcatagtttccaagggtgtctctgatcattgtcacagcataaatgaccaatttcacccataattagccaagttagtaagaagttattttttactgggtatattttgtttaacctcagttatatttgtaaaagtagaaactgctacttgttactgctttcagaatttctcacaaatgctaaaatgctttttaattctaatgcacttaaatggtttgattctccttacctaagaaaaacatttatctaaagatatactcttgactgattcattcattgattcatttgtcaatagatgtttatttatcagaatatgtgcaccagatacattgctagatgtaaagggtacatttggtgagcaacatgcatgatacctccaaagtatagccagggaatagataatggaaatgacactaagaatgaatacatattaacacaaaaagagagagagagtcatgtgtcaaggcaatttagcaggagggaacttgtcaatacaagggattaaaaggacagcatgactagggctggaggaggtgaggagaaaactcaaaaagtcctctggctgatgcaaatgaattggatgaggagcctatgaatacaaacgtttgaaggttactgatgaaagccaggtgagagaagatgggatttggaccaagatgatgatagtttggatatggtgagaaaggcatagatttgagagatttttaggaggtaaaaatccttaagatttgaggatagatatcataggaggaagggcgcaaagagaaagcaaaacatgtcaaggaatcacacctagatttctgggcaatgcacagttggtaattctttacagtgagttagggaactctaaagaaagatcagatttagggtggcaatttgattgtaaatgtttggatttcaaatgattggtgacatccaaaaagcactgtaaatagacagatagtgtgcacctaaagaaagaaggaggcgcatctgggttggagtcactaatttacatattacttgtatatagctagtaactgaaaccatgagtgtgaatgagattctgatgctaaattctggaaggtcactttttaaagtgttttgctttttgaagtacaggtgcaatactaaaaataaaaaagactaatttttaaaaattaaattaaaatgaaaagcctggaaagataaacaccaaagttatgatactagttgtagtatgggagagggggcatcagagaggatcggaatttcatcttgaatggtgtattttatttcaaaagaagctttgagcaaagataaaatgttaattctgagcattagaaggaacacatttgtttttttgtactgtggatctttttgtatttcctagaactcttaatctaaatcaaatattgcaaaatatatcactgtaaacaactggttggtcactagctttttaaatactttgtagcaacttggttgcttgtcagaggtcttctttgagtgaagtctttaatttatagttctttatgcttgatcagcataattgcaccaaactgttacttaatctgaaaaatagctgtttcctagagccctacttaatactgaaaacctactgtgtttgtattgcaattgcatttttttttttacttttccccctgcttttcagtttgtataatttctgttaccctatattcaagttcactggttctttccttgtctttgttgaatctacagatgagcccatctaaggtatttttcttttctgttactgcttttaatttctagcatttccatttgattcacttatagtttccagctctatactgaaatatactgaaatatagagctggaaactataagagtgaatcaaatctaatcttgcatattgtcttctaatcttacatattttctatctaatcttgcatattgtctttcttttccctcaagagtctttaaaatattaattatggttattttaaatttcctgtctgatagttccaacaactgttacatatctaagtctggttctgattcttgctttgtctccttagactgtgatttttcttgcttaggcatgctttgtatctcaggggtaaaagtcaggcatcttagatagcgtaatagatactgaggtaaataaacctttgacatggtaatttatcttaatctgactgggaattgggctgtgtttgatgttggtagttgctttggttgtcattgttgagttttgttgctgctgtggccaccagagacttcaaattcctctggtaactttgtttcctcattggaagcttgttagtgtagtggttgagtgtcgggcagaggcattctctaatgtttgaattaatacacagttggcctgggtcttggggatgtggtctttacaattatttctttcccttcctccagaggtagagtaacttcaacctcccattcccttcctggagctgcagtggatatccaccagtgttctcagtctatggccccaaggccctttctcctgcataaggctgaaaaacaacaacaacaacaaacaaacaaaaaaaaacaaacaaaaaaagaacaaaacaaaaccacacatagatgagatctggtgttcccttcccctaaaatgcagtggtatttcctcagtgcctgatatggtttggttctgtgtctccacccaaatgtcatgtcaaattgtaatccccacatgttggaggaggggcctgatgggaggtgaatgaatcatgggggcagatttctccgttgctgtacttgtgatagtgagtgagttctcaagagatctagttatttgagagtatgtaggactttccccttcactgtgtctatcctgctgctgtgtgaagatgtgcttgcttcccctttgccttctgccatgattttaagcttcctgagggctccccagccatgcctcctatacagcctgcagaactgtgagtcaattaaacctctttgctttataaactacccagtcacgggtagttctttatagcaatgtgatgtcttttcctctgaagagaagggtataagcagattcatggtgactagctactgtgacccttccccaatcagcaacacagagggtgttggggaggctttctccagattcttcgcatcctccttgtgaaggcaaggtacagttcctgaaggaagaagcttgcaaaaggttgggactccacctatggcagtagcccccaggatcttcacactctcaggctagctcccacatgtcccccaacaatttaatctccctactagtttatatggcatctgctccagggatccaaatgctcaggcactgcttctggctaaaggccaatctctctccagatttcaggttgttctataatgtcatttctctgatggactgatgaaaagtcattaatttatctgtccagcagttttcttgctacaagtatgggagcaacctctttgcagctctccatctccatctccaagttgaaactggaagtctgagcaatacattttagaaattaatatttgtaagttttccgtgtcataacaaaaataataaatgttcactgtggaaaacatagaaaaagattaaaaatatttaagtgcccatcaccacctagacaactgcaatgaacatgttggtaatgtcttcttccagttttttaaaatctgctgataaaatacaaaagatattgtttatataactttgtatcctaccttttcttgagcaatgcaagtttaaacctaaatacgaagatactctaacttcctactttacatttttgacggcagatgtcagctgtcttcccaagtgcagtacccttggcttaatatcaggtagacaaataaggccaccacaaattcacctttcacctcaataacacaggtaatttgatagttctacagaccctataatattacttgactgaagacccagaatacaagtctttcaaggattactctagaaactatataaagtattggtatcatctcccttcatcatatcttgccaaatccaacaggtttggaacttctgtaggaagatttttgtaacatgaaaaatgcgtgttgcaccttccatatccagcaaatacaccatcggttttttgttggctgcaccaatgacataaaatgatttcactgaatagggggtgacccagaatggaaatgtagagcatcgaaaataaaatcaaccgacgcagtctttgcagcaaaccatgtggaaacaaatttaaatatggaacatactctttccaactcatcttcagatgttgctttaaaatttgtgcaggtgaaaaaaaaatctttattttaaggtaactcaatcttttaccattggagagaatagaattatttttgtttcctcttgtatattcccagttgtttaaatgttctctgtttccttgtgtggacacataaatccaaatatatctaatatcaaggtatttaccatatgcagcactttttcctcagatagttattttttgaaatattcaaatagcttacctgtatcatcccccccatccttttttttttttttttttttttttaagacggagtcttcctctgtcaccaggctggagtgcagtggtgcgatctcggctcactgcaacctccacctcccaggttcaagcgattctcctgcctcagcctcccaagtagctgggactacagttgcatgccaccatacccagctaatttttgtatttttagtagagacagggtttcaccaatttggccaggatggtcttgatctcttgacctcatgatccacccacctcagcgtcccaaagtgctgggattacaggcgtgagccatcacacccagcctaccctattttctaaacgaacaattagttgacttttcttcagttcttactcagaaatatctgaccctaggttccaacttttgttttgctctttgcagttagtttttatgtgtactgttagggagatgtgctttttttttaccttcaaatttaaaagagagagttttcaattccttttaagtcaaaatacaactgttctactctaaagctttctttaaaaaaagaaaagtaccaaatcctcatccgtagtaattaattttgacagtgtaggctcagtagtgattcacaaacctgtattttgtgcatcagcattccttattattctaattaaagtggaacattgtgccctcgctaatcattaatgggttttcattttgtaaatgacatttgcagaagttaaaacagcgagttcatgtgaagtccacaggcaacggtgttgaaattagcatcaccatagcaacagtcttccatcattagcattcagggcaacaggaggtgttttgttgtgttttgtttcccaaaaaaagaaaaagaaaaaaacttcaaaggtaaagcctacagaaactctctcagaagatatttatgttccttgtgtgtatgtgtactgtactagacctctaagtctacatagaattttttttaaaaattgcaatgtggatcatctcctttccagatttgtgttttgcctagtatactagctaaatttcatgatctttctccagctgtacacgtctgacctgctgagcagcatttactcattgccaacctgctgctcaccaatagggtttcctacgtggatgaagagagtctgtattcatgaaaatatttggttcaatctaaaagtattatgtgtattcatgagtttttaatttaattcatggaaaatagatttatgctgttagatcctctggtgaactcatttagtcatgttgtagatataggtcaatgattattctcattcatgtttagacggaattaaagaggagtcaaatagagaacaatattatcttaactgagtctctggcagtggtattaccactattactctgtatgtgtgtgtgtgtatgtgtgtgtgtgtgtgtgtgtatgtgtgtgtgtgtgtgtgtttgaattctaatattctgggaaactttaaaagtggcatatctagcacttatgtttttctcagtactaaaatgcataaaagagcaccatattgacctaccagctgcttctaaatcacaccagtagtaggtaattatgaaattcaaatgaagtttaattttcatttattatacaaaaatgtcatagctcaaacccagaagtgttacccccaagcttggatatagacaggtatgtgtgtacattttacttttcaagatgaatcatagcagtcttctccattacatgtaaggactagaagttgtacattccactcaggtacctaaaggcaagcctgtgctagcccacactaacaaagcaaaatgaagcaaaggatctatctggctttcaatcagggatgcatctatgctatcatcagctctgtcacataataaatgagtctatagataacttgaactactcagccaatgggctgtaacccagtgattctgtggtattgaaaggcagcaacccccagaagccacatgtctcagtgtgcactccaggactgtaggcccatagaacttgtatgtatgcacacatgcatatgcattccccacttttctaatggcgatccaatctaggcctaatccacagctagtccagaaaagaacttttttaggttttctgtctgccatcactttgttgagaggcagtacaagccaagcaggtgtctgtatttataatatgcacaatgttaggataactcaaactcataagggaaagattaatggctgactactatgaaaaccgcttctagccttgtgataccagcacctactatcttcctttttctcttatatgatgaaaagatttcaatgttggcttttcattctgatagaatgtgcaagccaaaatctaaataaagtccagtggcaatgatccccttaaacattatatctttcttctcgatatgctgatgttttcccttataaaaatctatgtaagtttcaagatttatatgacagacaaaccacacaaacaggaggtccctcacattcactactagtcacttgctctatcactctgggaatagcggtcttcagattgcatctctactctacctcttgctcttttcaacccctctcctcttttttagaccatacagggcatcagacaaggtttagtttaccactaaactttgggatttggaagatggtgtataaactgatacaggtagtccactcacagatgtagtatataattacagacttgagttttcaggggctcttctccagtttcctgtcaatcaatttccctggctgagacattagcatttgtcagtgaccatgcttactatatacatacacaattgtgtatacacaattgtaaaattaaatacgggctttagaagagattattttttcttaagagtaggttactctataaatgccaaagcatgtgttatgacatagaaattcaaatgactaagaatagctaattgtttagaaacatcttacttgatgtctattgttccaaaatttgatccaatttagagtggtaccaatccatggtgtagaatataaaagctaaaggataacaaaaatcctaggaatctcatgccagtaagaaagttctaccagtcagatgagatgttgagagcatttatgacttggcatcaggaatattataagtaaaattcatgtgagcagtaattgcagctatgaaccatgttatttgttcccacttgtccaactgtaattctttcacttagctcagagtagttctttgtaacattagggcccactcatctgcctttaggtagggttttaaaagatgcctagaaaatagttctgtgctagaaatcagagactcttgacctactgtaaagggagcagtaagcacgtttcctcaggagaatctttctacatactgcagattcccataaaaatctttgtgacaaaattgcctttactgaaaccatcatccattggattaaaaaatagcttaccattagctttttgaaaatagaaaacgttgagccttttcaatgatactttcaatagtttttcacaactatgagtcctcaagctatcagtcttatttttagataccatacttataagatagttatagaatttatagagtatggtttaaaagactattcaattatagagcaatcattcagtttattcccatggcagaagtaaatggaaaccactccagatcaacaagaatctactctcttctgattcagaaaagagatttcctatcttttcatgaataatccatgttcaatgtttaacacctcaggaagattttcttaatagcttcttctggtcataaatccttggtctgtcatcagggacatattgaagagttagttaccaaagttcttaatgtctcccattgtaaaaaaaaaaaaaaaaaaaagtcactttttggattgtttctttcatagagtccatgcttctgtacgcttaatactttagcttttgacttcaagctttaggtaatgcaaatgaagctattacatcaccaaagttaaatttttcttgtaagtatattctcaacattcacaattgagagctgcctcttctttggctggtataaggttttaatttattgtagcactttcaccctagaatggcaaaaaatgttgaaatcaattccatatatcaccaatacaaagtactaagtcaaggccgggtgtggtggctacgcctgtaatgcaagcactttgggaggccaaggcgggcagatcacttgatgtcaggagttcgagaccagcctgaccaacatggtgaaaccccatctctactaaaaatacaaacattagccaggcgttcatagcgagcgcttgtaatcccagctacttgggaggctgaggcaggagaatcgcttggacttgggaggtggaggttgcagtgagccaagatcatgccattgcactctagcctgggtgacagagcgagtctcaacaaacaaacaaacaaaaatattgaattgtacaccttaaatgggcgaatcgtatggtatgtatactaaatgtcaataaagctgttatatgaaaaaaaaatgctaacacacacattctgaaagtatattaaaagcaaacctacggccgggcgcggtggctcacacctgtaatcccagcactttgtgaggccgaggtgggcggatcacaaggtcgggagatcgagatcatcctggctaacacggtgaaacccagtctctactaaaaatacaaaaaattagccaggtgtggtggtggacgcctgtagtcccagatactcgggaggctgaggcaggagaatggcgtgaacccggggctggagcttgcagtgagccgagatcgcgctactgcactacagcctgggcaacagagtgagactccatctcaaaagaaaaaataaaaataaaaaagcaaacctacaatgtctcttacaaacacaggcaactattcaattccgagtttacactactgaaacacacatgaatatgacactaagagaatcacgtggatctgcactcttcaatcaacactacgtctctgagcacaagaattttacatctgatttccatttggggaaatagattcagaatgccataaaccagatacttcttgccttcctttagtggtcatttctgccattatcatttaagggaatggatctccttctcccaaaactgttaccctaagattacaagcttgtcctttaacttatctctgaaagcacacctctataacgggtcatcagtattcagtcagctaattagactgcagaagtacgtttactcaaatgtgaggagataaaattgtgaaatgtaagaggaagaaagaatgtcaaagataatccaacccaaactcttcatcttacagataggaaaatggaagtccaaaaggggaaagtaattttagtaacatggctaaactggtctagaaaaccagatcttctgatacctgatcccatggtctttctaatgccatggatgttcgggtagaggatatattcaggtagataacttatagatagccccatgtgtttgtatagcactttatcgaacactttcacctctattatcacacttgattcttacaatatcccatggaatgtttgagtatcatatatgattattcttattcccacagacttggaaactgaggctttgagatgtctggatctatcttagatcatttgctatggactagaatctgggactaagttgcttttgtctaagctgtgtgtttgttctgttgtgccgtattgttaattcatttctgttggtaaacaacacaaaggaaaaacttctataattatgtttctttttcatcctcaggtcatctatcctactttttatctaagctttggaaaatattatgtgctttccttttttttgtattttcttttcgtagagatggcagcagggggtagtctcaccatgttgcccaggctgacctcgaactccttggctcaagcgatcctcctgccttggcatcccaaagtgctgggattacaggcgtgagccaccacacctggcctattatgtcctttctttagcttgctcgtttaaccatttgtttggcagggggagtcagaactgtgttttacttagtcgattaactgataggacaatttaatatctaccctgcactggcagtaacccccatagccccgctctgtgtctcattctgtgccctgaacaaccttgtcttaaaaacattttaaaagcagcaagtatggggagatttcttatctccatataatacagaagcaagtgtagagtatggctacggaaaacaaccagcaggtgaggctgtgacataacaattttaacccaagcctcactgccacattgaggtatccttgttcaataaatagatcagaaaatatggtgtagtttttccctaacgctgtctaaacagcaacaacaaaaaatcattacccatagtatttcagtaatgtgttgtattgaatgcattgttttcgagggcgttttcaaaaaataagttgattgaatctcttttttttgcttgaagaatgacccacattcagaaagtatacagatgaaacatgttcagctcaatgcaattatcacaaaatgaatacacctatgttcgccatctaggacagtaaataaaacattatcagtagccctaaaccagattacacacacacacacacacacacacacacacacacacacacactaaaccagactacacacacacacacacacacacacacacaccgggttgggggagtggtgagagagagagagagaaagcgaatattatgttaacagttggggagtctaagtgaatggtttatgggtgttcttttaacatttcaattggtttaaaattttcaaaatgaaaagcttgaggagaaacatagaatataaccactacctcagaaatcaccaccctacctcacccacattccctctcccaatcactattcctccctcatcttaaaggtaactgctactctgccttataacactatggttgagttttgcctgtttatttgaactctataaaaatggaattgtacagtatataaccttttgtatctaggactcaacattgtgtttatgagattaactcatgttgttgcatgaatctgtcatacattttcattgcaatttgatatcccatttaaaatgtatactataatttatccattctattgttggggaacattttggttctttccagtttgaagacattatgaataaggcctcctatgaacattctttaatgcgttttttggcacacacgtgtgtacaactgtgtttggtatatactttgcagtaaaattgcctatgttgagggtaggcatatgctgagctttagtagatactcctggttttccaaagtggttgtaccagtttacaccatcattagcagtatatgaaagttctagtagctccacatctcaacaatacttgatacttgttagtctttaaaattttcgccattgcagtgagtgtgtgagtagaatctcattgttattttaatttgcaattgtctgattacttatgaggttgaatatttttacgtgtatttattgaccattttggatatcctgttgtgtgaagtatctattcagtctcttgcctattttttttattgattcatccttctttttcttattgatctgtaggagttttttttacatattctagtttgtagccctttgtaaattgtatgtgttgcaaatatcttctcccattttatagctttccttttaattaaattgtttttttgattgatagttcttaactttaatatagtccaatatgtaaatttttccttagggttaattcttttgtgtcctctttaagaaatctttcctaatacaagataatgaatgtatcctcttttattatcttctagaaacttactattttttaacttttccatttagatatatagtacacctggaattgaccttttgtgtaatatgtgagatagagattgagttttatttttcataatatggatatctagttggcccagtacttgatgctaaacattcatttagaattcatttgatagtatttcctttagagttattgcatctgtgtttattagttatattggtctgccattcttgtcaaggtttggtatgtggattattctggtttcataaaggcaagtagggaagcattgcctcttctagtctctggaagagtttctttaagattggtatttctgccagtgatatgatttggccttggaattttcctagtgggaaaatttataattacagtgtttatttcttaaatagtacagggctattccaattttctatttcttcttttgtcagtgtcagttgacttaaagcacactaagatactctaagattgctatggtcagcctttgctggtctaaaccagaggttgcaaactgaaatgccaacagaggggctagcctgctactgtaactgggcaaggctagcgaagcgtaagttaatgggagctggtagggactatagaatacatgtgccgttatagaatggtggctccggaaagttattgtcatgcaagaataggagcccagcatggacaaatcattccttttaaatgagaagtcagaaggttggattattctgtaaaatatctctgaatatttaaatgttgagtaattcagattaaaaaaaaaaaaactgtgtgggctaatcaaaacatttgtgcatgccaaatttagcccaaagtctgctagtttgcaacttgtactttcaactaatgaaaagcgtaatagcacagatataattccattttcaaataatataattcatttatagttgacatttatttaatttacacttaaatatgaatttgtcatttaatttaccatattaaaaaagtttagattttaagacatccaagtctgcaaataactagaatattttcatttactctcatgtttgtgtacttatttttccttaaatgttattttcatgatatacttagtgtcttgtggacattccaaaaaactgatttgacttaaattgtcctcactccaagctttaaaattgcttagttcatagcctaccttgcctaaagcaaacctggtagtctcatttcaagttactggattttttgtttgtttgtttgtttgcttttgccttgtttcttttcaaggttatatagagtgaaggaatatcagacttcttttaatttttgcagggaattcagattgctgtggattaagatcctatatataagatgcttaggatagaggcatcatgaatgaaaaattattcatatgaacacactttttagagtattatttttattcattcagcaaataatcatagctgccatactaggcaggtagggaccatgaagactactgtccttgtagtctaaagtcttgtagactaataagatatgtataactgttaaatagtacactgaaaatacaaccttaaacaatcaaaatatttgcaaattgtatttagttgacatgattgcataattgtatttatgtgacaattatatttgttattcacatatttagggagtcaatatgtacttaaggtaatctttgagctattttcaggatgaggtattagctcattactattaatactaccatcaccaaatgcattacctacttatctgcatttccaggaaaaattcaggaaattaggatttttaaaataataaaataatagtaaataagactgggcatggtggctcatgcctgtagtcctagcactttgggaggccgaggcgggtagattgcttgatgccaggagttcaagaccagcctggccaacatggctaaaccccatctctactaaaaatataaaaatcagccaggcatggtggcgtgcacctgtaatcccagctactcgggaggctgaggcatgagaattgcttgaacccaggaggcggaggttgcagtgagcagagatcatgccactgcactccagcctgggcgacagagtgagactctgtctcaaataataataataataataataataataataataataaacagaataataacctaagtgactatatttgatatatagttaagtgatgtttttgtagactttactaaactaaaaaataaattagcagttatttaattttctagtttataaagtacctacttacataaagttgcatatattacttcatttaattttaaaagaatatcgtaaaatatgtaggatagatttccattttatagtcaacaatacttattatttcaatacattatgtgattttttttcccccagtatcacagtgttagagcccaggttcaaaccagcattttctaactgtaagtctggaagtctgtctgcttactctatgtaagatgccttatgaagttcatagaggagacagctcagtggattcaggcctggtcttatattttgctgttcatcttgttttaagtgttatgttaagcaaataaaacataactttaaacattctgtttacttttaaaatttgatttagagctaacaaaaattagaatttgtactccatttacaacgaacagaacaaccaaataagcaaaattgtatttgcgttgtcaattacaataaataattataatggtatatcagagtgttaaattttgatttttttttttttgagatggattttattttattttttattttttttttttttgctctgtcacccaggctggagtgcagtggactgcaacctccacctgctgggttcaagtgattctcccgcctcagcctctcgagtggctgggattacaggcacccgccatcatgcccagctaatttttgtatttttatagagatagagtttcaccatgttggccaggttggtctcaaactcctggccttagatgatccacccgcctcgacctcccaacgtgccaggattacagatgtgagccgccacacctagactaaaattttatgttcttatatttctttaaggaaagcaaaaatgttgacagagagggttaatactagttatatatacaaaaaacctaaaaataagattttggattattctattatatgattattcatttattgaaaatcataaactaattgaatgactgagagcagcactaatgtgattactttggtaggaatctgtcctccaaagttgtcagttgtcagttattcttagcattttgaactgaagtctatgtaattaagtcacctgttgtttctgacaaaatgagcaaacacacataaaatctcttggttcgtcttcatgtctctgtggcagagaactgaccacattattcagttcctttgtcctttttagacaaaagccacctctacatggccctataagtcttcaattcaaggactatagccgttatcttaatgggattgtacttggttatctgataaattgtcgggaacatacccacattgcttcctttacctgacataaaatttagtcagctggggctcaacgattgaccagctttatcttgcacgtagtgaagggaaggactttcttactcctggatgtgcctaaatttaagcctttgaaaaagattgaagataccaattggcctacctgccctaagtagatgcttcccacagacttaactggtgaagtgcttgtctaaggtagacagaattttttctttagagaggagcaaacaaaaacccaaaaatactggcgtgttcttttgatgttctatttcccaattgatttccgggttcacactactccacaacatcttactgtcccattgcatcttaaccctctctcctctcccgcccccactttttttttgtctgtttcttctgcttccaccgttgcttctgctctgaagcaatcattttctctcccttcaaccaagggtggaattggcacacagtcaattggcttgggagactgcttactgatctgtcttttttgaacactggaatcttgacactggttatcattttgaggacagcctggtttggatatttatctattaagaggaatccttaattggtgtctttgactggagtatttgaaggagtctttaattgggaggttttaaggcaccagaaaagattcattaggaatgactgacctcatgttatataaatgagaaatatttaccatttgctgtacacgtaattgaagcatgattatacataaaagcatataattaaaaaatgtaaataaatacctaaataaataaatgcctataactagcatggcaaaggattctgatatcagctttcaatctcttttagtagagactggacaaatcagaaaaagaggatttatacctgtcctcctatagattatgctttcttctcccatcatccagttttaattgaatctcctcattgtgctttctttcaatcttgagctgcacaagttgttttctcctgtcagagcttttaatacacattgacaagaattattagtctctatctgcagttgttccaagtgcaggtttgaaataaggagtcgtcatcaatgtgctaacgcgtgctacttttggtatttatacaaagtgcctgctgccagttacttgccacttagaatgtgtttttcttttcctctcttgcgttgtgggagtagaaggattctctgtttcttttggcagacagagaaattttcagattggggtctaatgaaagaaataggttccattatacagatgtacagatgttctaaggtcacgatacctcctataatattcttatgtgaaacctcctctttatgttcaacctgtgtacgttacacttatacatagcaggcatagtagccatcaatattagttactttaaaacccaggcctcctaggctgtggtttgtactaaaacatcatattcaaataaaagcattccaatacaaagtggagaaacagggacaggcatggtggcttaagcctgtaatcccaacaggctttgggaggccgaggagggcagatcgcttaatcccaggaggtttagaccagcctggccaacatggcgaaacctgtctctactaaaaatacaaaacttagccgggcatggcggcacatgcctgtaatcccagctgtaatcccaggctgagttatgagaatcacttgaacatgggaggcggaggttgcagtgagccgagatcacgccgctgcactccagctttggtaagcctcggtaacagagtgagactctgtctcaaaaaaaagaaagaaaaaacgtgtagaaagaaagagaggatctgattaagctcacaggaacattgcttctcaaattttaatgtgcatacaaattgtctgggaatcttgttaaaatccagattatgagccagtgggtctaaaatgagacatgatgttctgcatttctaacaggtgatgctaatgctgctaatctgtggaccaaccacactttgagaaggaaggaagtagactattatatttactcattcacttgttccatgataactcttaaaacagactggtgactttaatacaattcagagcaccaaataaagattgtcatatgccttatttttaacctatcgtcttatatcaaaattatctgataaacttcccaagtgtgcatatatattgtcattttaaataggtttcaataaaatgaagattcgtgagtaagaatataggaataaatgacattaaaatctttctttataatttatatttctactttcttttgaaagaatttgtagtggcttaaacataagagcacaagatgagccagtgacaggaaaaaccaagtgcatctgacatcttagcttattaggtctagaagacaacctccattacttggtagcaagcggctgggaatattggtgttcaaagctgtgctttcctgaaggcaaaaacagcatcaaaatatgaaaagctttttacttctggcatgagtgataaagatgccgatctgagaagcaggtgaaaaaacttagcttatgcttctaaaggctaattttatataagtgttcttgtccagctgttcttggtaagtccagctgctagttgaacaggacaggtggtaatccctgttcagtggctcattatcacccagaggctttgatctggctaatacataatcaatcagcttctgaatattaatattcttcctattttcatttcacttgttttacctaaatttattttccaaagttccagtatgtttttgttttttaataagatttttgatcatttatttattttgacataactaggctcatgatatgccagctggagtttattacacccctgaatcacaaactttttttcttccctctttatctccttacaagatccaaattgcaaaacctaaggataaagttctaattttggaagcacaaaagactgaaactattttagaggagagcgttaatgaaaatcaatatctaaaatcctcattttaagactgtgaaccctatagtctatacttctagtgtcttcagagttgtgatatgcatacattaaggactaagaaacatttttttaaatagtcagatttgggagcattagatatgtttgtagagggaaaaatcaatttatgataaaaattactgacaatggtttaatttgtattagttttgcccacttccctgttatctcagaatggcacctccatggacagtggaatggtcctaacagcctaaatatggtaagctttaaaaacagatggcttggggccattctgcttattatatcattgctttcaatagcataactgttcttctccaatggccctctttgttgtttgcttcattactggcacatttctttaatatgtaatctataacattaacatgaaaatggctctcaaatactattactttctccatctgtgacccagtactgtttatcatcatctaatgatcattcttattgcagatggccctctttaaatgtttcagaatagcattttaaagacattgagggtgcttcctacgtacattggcagactgaatgttttaatatcgaaaatctcggtctacacgatgtgtgataaatgactggagatgcaaggcaccagtcagttccaaagcaaggtgtaagagggacaggaggagagtgataaaaaagaatacatactttgcgtgtgtgggtgtgggtgtgtgtgtgtgtgtgtgtgtgtgtgtgtgtgtgtgtttaagccattagatttatctttaaggaagcattatctttaaggaaagttggagtaggaagaacaaaatttaatcaaaagaaacagttcttggccagaggaggtggctaatgccggttatccgaacactttgggaggctgaggtgggagcattgcttgaggccagcagttcaagacctgcctagtcaaggtagcgagacaccccacctctgccaaaaaaaagaagaagaagaagaagaagaagaagaagaagaagaagaagaagaagaaacagttcgttattgcagttcttaaagaaggagtttgtgtttcctttctgatcattcaccatggcagtgatacaaaggagtgatatcaaattgataaatgagttccctaaggctcaacatatactaaatgcctatgctgaacttccaggtttcaagtccctagagcctctctgtctgaagatcctatcaccaaggattctttgtcttcatctagtactttctttctcctctctctattctttcctcatttgcggatgcttgctggggcctgtcaatcaaacatagatgatccctgacttacaatggttggatttaggatttttttacttgataatgctgcaaaagtgatacacattcagtagaaaccatacttcaggtatccacacaacccctctgtttttcactttcagtacagtattcaataaattacatgagctattcaatgctttagtataaaataggctttgtgttagatgattttgcccaactgtaggctaacgtaagtgttctgagtaagtttaaggtaggctaggctgagctatgatgttgagtagattaggtatgttaaatgcatttttgacttagaatattttcaacttatgatgagtttattggtacataacctcattgtaagttgaagagcatctgtatctgggttggagcagaagtattgctagtaatgcatccatgagtcaactgtttgcttaattggtatgctaccacacatgtcttgagcttgttcatcccatggcttgccattgtgttggaaaggaaggtgttacagcattgccgttaataacatttctaaatgggaccaaaaacagtattttctttatctgctagatctttttattttcttctttctctgtatacgtgagctgttcccaaaatttagcacacatgttttatgattctcaacataacgtttatggtccttaacattaatctcatattagaaaataaatcatgatgaaggtgaaatatagaccaagcaggggcagttatgaggaccaaatcgtcagtataaaacttttataattaatattttcatgaattgatagcacttgcttcagagagctaaactcagaaaaaagagaaatattctaacctgaaaatatatttttaaaaactcataatttaaggtagggggcaagtagatttggccatattttgggctttcttcaccaattcagacacgataatgactacatttgtatcctagatttaaatttgctagatggaaaagaaacacataaatataaaccccatctgcgcaaacaaacataaccattcacattcttatgcaggattctggggtaggggagggctttttttgtattataacatagcatgttaatttttaagataaaatggaaatatttttgtgcttttgttaatttttatgttaaaaatgacattttaggcacctaatcaaattctctgagttctttcactaaagaattttgcctaatatttgattaaattcattattattaaagatcaatggaatttctttcagtttgaaaagttgaaaaaatgagttgacacattgattcatagaaaaagttatgaaatttgagaaaaattattgaaccaattttatttaaaatacatatagatattatgtgtatctgccttcattttcaggataatgaatgtcagtgttaaatgtggaaacattctaaaattggaaatcagactccacttggttcaaagaacaccttattttagataagccttttaaaataatgattgaaatccagtcaatccataccctcacacataatcctcatgcatgatctttgtttttccctatctctcctctaaatgtcctttacaaagatgagaaatgttcttcccaacacaaaattcctttgattgtatattagaaagaactgacactttgcagcaaggtttaggaaaagctaacgtaagtagagcttctctgaaaactgttttaccaaaacatactggatttactgctgttaaataatggatttttttttttttactatttatatttgctcctcattgaaacttgtaaatgactttattagtcttaggcaacacatttcattttgcattggataaagatgcttcttcagtaaagtgttcatttatagcattgagaatcttgaaatataaccggtgtcatcaaagggtaggaaggtagaggcacagagaagtgattaatcacttttccctccaatgaatgatctactgtcaagttcaataatcatatttcatctataaagagcactttgagcaaagcctgttttgcacacgtcattacatttgattacaattaagtataaatatatgcctattatttagctctagttaaaatctgcaaaaatatagaaggcttgtgggtgatgtaaattggagatttgcataggtttagggtacaatattagaaaacactgtagttttatttttgctttatgactaaaaggcactagctatgttatctcgtttgttcaccaaactaaaaaacaacagctaaaaagcaatgtaacaaatttcctctaaccttcttaacccatccactgctgtcgcatgactctcacaaatcagaaataaagaaccatttctctactgaaggtcatcaactcatttgagggccatagatcagtaaaaaataacttagtctgagacattcaaatcacttgctttttaggtaaatattttggcttttaaaatgacacaaatctgaccaaaatgttactcagctttatgggaacgggattcttttctagataatcttagggacgatcttaactcatattgtttttgttcagagactaggtctaatttgttagaagtgctgccatgggatctcattctactcaacaggagtgcattcttcttatccagtatccactaaaagtcactcctcctcccatgaaaagagttgccagtggaaaactcagagaaaacatgggaagggattggtgatgtcatataaggagattagaaaacatttttttaacgtttaaaaagtaaagagatgaattttaaaatttacaaaccaataagtttgatgttgatgagcaacaaaatcctggaaaatgacatcgtactgattattaatgattacataggataacatgctgctgggaatcagcgtgatactctcaaaatctgccatgtcacatgcacctcattttcattttttttatggctgcttgatggttagatgagaagactgttagagacagcataacttaggattttacaccacatttttcaagttctcttttgagaatattgggtacaagataaagaacagtggggctggctaataggctgaatttgaagctgattaaataatgacatctaaagaatgtcaattaatagatctagatcaacacaaaatagagtctctgtcgttggccctgcctttgcacatggctgtttcttcttcagtcatctcttaagctcaactcagccctctgcctgaagacctcatttggccagttttgcccattcattactactgtgaactctcttttgttatttttttcctgttttattctgagaatggattgagctagatatgtggaagttatgggaaagcatattttaactaaatattaaagaaacttttgtaatcgagctctccaaaaaataaaatccgccactttgaaaagcattaaactccctgtacagtagattttcaagactgaaatgactgtctcacccctaaaggcaatttctgtattggatgagaggatataattcattaacctttaaggtcacttgtgaatctaatgttttgatattttcggaattaatcagaagggaactgacagcatgacctgaatctgtcctatatttatgtaaacatcctgtgtgatgcacctcattctttgtgcagttgtatgcatttttgaatgttaaatttgattttagggcaaacgcttttttaaaaaaattttaaaataaactttattaaataaaaatttacacacagtaaactgcctccatttaaagtggttcagcgatttttggcagatgtgtacttgtgaaaccaccactgcagtcaaatgacagaacgttcttactcccccaaaagcctccttgtgcccctttgcaggtcatttttcctttcacccctgattctaggcaaccactgatcgtctttctctcactgtgtattactttgcattttcaagaattttctataaatagaatcatacagtatttttgtatgtatctggtctcttatattcagcataatgattttgtttccagcttgaggatattatgaataagactgctaaaaattgtatacttgtttttctaaataccccttataaaatcttacttttgagaagcatattactaaaataacttcccaggttatatgtgtatttgttctttctgttcatttcagcattatcttattaacaagcaactggaggacatgcaccaaggataaattgactaggtgctaactgaatttgtgagaaaggcctagtttctaacgttctttcttgggagcagatgtgtaacagctacttttgctgtataacagaccaaccccaaaacttactggcttaacactgaggtcagcaaacattttctgtaaaggacaacatagtaaacactataggctttgtggagcactttgcatctttgttgcacattctttttctttttacaactctaaaaatgtagtcatacttagctgagaggctgtacagaagcaggccatagaccaaatttgaacaatagttcataaactctataacacaatggccagccatttacttagctcactatttgatgggtggattgggccatttatgtggtgtgaccagttgtactactgtttgccaggcatgcttatgcatctgtagtcagctggcagctggataagctatcgtgacctgactcatatgtctgatggttgacaggctgtcatctaggaacagatgcaactaggtttgtgtgtatctcatcatccaacatgctagttcaggctagttcacatggaaacttctcaggtttctgcttgtgtcatgtttggtagtgtccattagccgaagcaagtcatgtcatagggccatcccagatgtaaggagtggggaaagactccacctgttggtgggaagagatacaaaggcacactgcaagagctggacaccaaggagagggctagaacttttggccatgttgcaagatatcacaaaatattcaagaaaagttacaggaaggttcctctgtggactaaattctcttctgaatttagatgtaggtaaaatggagtgtgctgttaaaattcatgctttgtgagtaatcattgctaggctaaactgtttgtggcttcacagccaatggtagacatacagcatccataatctagtgcttttaaaaatataagaaatactgattacaaacatagttaaccacttattagtactgggaatttaatgaaagctgctgtgattaaatactgaaaaaagaaagattgtgggtttccttctggtaactttcaaagctggtcactcttttgaaaggaattttattcttaaagctgttatttttactcataatatgcttaatacccccatggctgcagactgtctaaaatgttcctacaattatatgagaatacttttaaaaatcatgataattatcagtcttcatggacacttattcagattaatttccccaagcacttaataggatgaatttataagcattaaatagaatggggaccatccagccctaaaatgtgaccattctgtcaggcacacacttgccaatttgttggcgtggacctgagcacactagcaaggactttgaattaggtctcactgcaagatggaagcagaagggcatttctcagtttatgttttgaagtgttttgttcagacaggcaacgtgcagttgtgtatagtagtgtgagctacctgttactccccttaacaatacttttagcagcaatgtttttcctcctgcaatgtgacaatatcaccatgccatttggaagaaaacaaaaaggctgagtgattcctggtatactcccaaacagccacccaaacgaacagctggcagagaagacaccccctaaaacttggagcagattctcagcccctgcagcatctcatgtggttagaacttcagacttgatgaacgcctccccaacttgctccccctcctgaatcttttaatcctcctccagtctcttgtaatgttccagcccttaccagggaataagactgcaaactgtcttccgtcaacttctttccaaatcctagtctagagaaattataatgatgcatgattgtccagtgggcatgtatagtttgtccatttctttatgtagtaaagcctgtagctttcatcttttttgccaatccactataaaaattaattttatatgtcatcctggtacacacacacacgcacacacgcatctatatctgtaaatctttttctgtctattcatgcttgtatgattgaaagaaaagtttcacaaaacattacttacccataccaaatagtacactttcatattttttttttttttttaatttcaacttctattttagatacaggaggtacatgtacaggtttgttacatgggaacattgcatgatgctaaggtgtggggctcatgacctgttacccagattgtgagcatagtacccaataggtagttttataacccattttccccactccaacctctacactgtcatattttctattcttttctgtttcattaagaacaatactggtaatgatccactatatagatttcatgacgtactaagggttcatgacctgcagtttgaaaaacactgtagttagttttatctccacctcaggccaggtcatcagaaagctgcattcttagaccactttgccttggcccccataagattgcctcaactcaggtgtacctcggcatcatgttcctggcttatgtcgaggggcactgaaaactgctgaagggatttttctgaaagtcgacaccatgcagtgtctcccaccttagatcccatgcagatctgtttattcaatctaagtcattccagacttggattttcctttgtttcacttacactctttcctccttatcaataatccaaataataaaatcgatcatatttccttttatattttttcttttgctttgacatctacaaaggccacaaccaaattatacccaccttttaaaacacttttttactgaaatatattaggcatgtagaaaataagggagatgctggttaaaggatatgaaacttcggttaggaggaataagttcaagagctctattgtacaccatggtgactataggtaatgaaaatctagtatagtcttgaaaattgctaagagagtagatttaagtattatcaccataagaaatgataagtatatgaggtaatgcatatgttacttagcttggtttagccattccacagtgtatacatatttcaaaacatgttatacatgataaagatatacaatttttatttgtcaattaaaaaaaaagaaaaaatggcttaaacttatacagttcagtgaattttcacaatctgaacacactcatttaaccagcatccaaataaagaaacagaacattaccaacctttagaaggccctttgtgtgcccttctgatagttacctgtcctccaagggtaaccacaatcttgattttgaacaccattaaatattctggcctgttcttgtcctttatataaatgaaattgcacagcatgtactcttttgtgtctgacttctttaaacctggattcatccatgctgttgtatgaagtggtggattgttcattctaattgctatgtaatatcccattgtgtcaatatcctgcagtatattatatactctactgtggatgggcatttggtagaaaaaaatgatgttataaacattctaagacatgccatttgatgaatatatgtatgcattcctttgaggactatatcaaggggtagaatttctgggttatagggtctgtgtgtgttcagcttctgtacattcttccaaacagttttccaatgtggttgtaccagtttgcactcctactaacagagcatgagagttgtagttgctccacatcctttctaaccctgtgttgtttgtcttgctcattctggtgggtatgcatagcaaaattttcataaccacatcatgcactgtgatcttcaaagctgtgttctggctgggcatggtggctcacacctgtaatccctacactttgggaggccaaggtgggctgatcactagaggtcaggagttcgacaccagcccggccaacatggtgaaaccccgtctctaccaaaaatacaaaaaaattagccgggcgtggtggcaggcacctgtaatcccagctacttgggaggctgaggcacgagaattgcttgaagctgggaggcagagtttgcagtgagccgagatcgtgccactgctctccgacctgggtgacagagtgagactccgtctcaaaacaaaaaacaaaaaacaaatctgtgttctaaattttcctcgcttcttaaagttttatgctatttatatttccttagtgctgggttttattaatttttaagagttatacattgttataagttgccctaaagcctttacagaacaatgcacagtataaatatgtacatagtatatacacaaatatgaatccatgaatgcacagctaatagggccattatcaaaaatcctacacttttccttttcctctagccctcacattcaattggctcaaaagtagcattgattttattctataacctgtcatgaattcagcctctccacaaattcccagtgctcctttcttagttcagactttcatccactcttaactgggctgttgtcatcatctacttggcatacatttccattctgatccctaccctcttttccacccttgtttcttcccacctcaaatttaattctattttaaaaagaaagatattcaaaagtacaggtggtgccaattttttcttctctatccatcatatgcaaagaggcttccaattctttgtcgacctgtttctaagggatgagagtaggtcaagctgtgaggacttcaattcccacgtgaaggtcttgttcatattaactcaataatgtgctttgatgtcctaatggggaaagtagtattttctgccagttagccttcccaagatatcaaatccaatattggccaaatacatttttgaattcctaaaaagcctaaactgatgtcgtaacacagctgtatattaacataaaaactctgtaccttagtaaattattaatatgagcgattagctcacagagtcaatgtaagaaacttgtttcaactcttcatattctagcaaaaagaacacacacacacacacacacacacacacacacacacacacacaaaacctgatttaagaactaactaggtgattaaagcctacttagtttttaattgaagtgcatattctctaatcccaagaggccaaactaatcacctttccctttttgctgctttttttctctctatttctgtaattattataatctgtctgatactgtgtttagctatatatgggtctatcttctctcattagatcataagctccttaaggaaaaggccatatttccttgggatcccacttaaaaaaaaactggattacaatgttgaaatttttatatatttccatgtcattctccaaacactccccagtttttaccaaccataaagaaaaaatgagaagagtttaaatgataagcaaatacatatgtaagtgttccataaatacactatgtttgaagttatttaaagaacttaatataggataatatttaatagagaaacttagtctagatagagcacataaaaaacattcttggaaatttgtggataaataaaagttccttgcatctgtattttcctttcatcttgaaaacatgccttgacaaaagtaagccagagctggagtacaagattcagacattggtagatcattaattggttaaactggattttatcttatttccccttttatggatccctgtctttgtgtggaattcctgccacttgctggctgttcaaggcttgccaccaggagactttctccatcaagctaggggatatttctccctcactgtcccccaccaaatcaatattcacttgctctctgactactccaggtttctgctgtctgagaatatgaacatggatataccttttaacatgcgtgaatactattcatattttaatctcggccccactgaatgatagcaaacgctgtgaattttatgcctatctcaggctacagctagtgccttatcttgcacacacacaaaaaaaatcttacttttcctacttgcttccttcttaagtgtaaaaagcaaaaagaggaaaggtgccttttgtaaactgctaaagagcagtttacagaagagcagtttactaaactcagacctctcattttccctcacacgacaatctaaaacagaatgttaaagtgaatttatttggttctgtatacctaactattcctgaacatactgagttctcttttaagaaatcatacctgcctgacaggctgctttgcatgaacacagcattccccagccttcaaattgctgtcagagccgttgtgtcattttgacccacaatatggcagtattatccacattctatagatgagttaacaaaagcttccaagtggttaagtgacttgcctgtaaagggttaagtgacccacctctaaggggtagaattggtctggacactctgcccctctatcttcatgcctttgctataatacacagctacgcttgctgaagattaaggaagctgcttttgataaagcgtgattcttgtagatattcatctcaggaaaaaaaaaaagaaaaacgctggtgtcttcatctgtagcatttgattattacattttccttatctgtttcaacttaggatgacttccttgttcgcttaattgactggtaattcctttgtttacttttttccaaatctcaagaagcaagtctagagtattaacaatggttacattagcatttaaaatttttttttgaaatttgagtatttcagaaaggggtaatttaggcaggcatgtatgtagaactttgcattttaattaaaaagactcaaaatgaaatgaacctctgacagtaacagatgactacttctaaaagctgcattactacttgatatatgctcagtattttcttgtgggtaagtcctacgacttgtttcaagaaaagtgacaggactaaaacaattaaaaaagacaaagctgctgttttttaatcatatgttcataaataaaactaggttgtgaattgtttccagagaagcaattgacaaagtatgagtaaatcactctaagaactaaagctgcgttgattttttttaatgttcaaccaaacatctatccttgtccaatgatgaattttctttgacaaataaatatttacaaagtatgaaatatagactctgtgcctttcctaaggccaaagcatactgtttaaactaaaatttaattttttttctcacctcaaatacaccaaaataagaacataactaaaaattaattctctcttgtagtagactgtccattaatcttttgttagataatattagcattgtgagtgtcaggtagaaagaaaaactgtaatttctagattgatcagaaaatgtgagtatttatggatttgaagaaaacaataaagtctgataaaatagaattttctgtaacctcccttatggagtcaagaaggaggaatctttcaacatcctcccattttgcagtgaaaagtcttcatgcagtaaatagtttgcttgggtagatcaaagggttaatttacttctgatttgagaagagacgcagacttccctgatttttttacaaaaatgtgttgtgtgggaggaaggtagaggcctcagaatgaattcactaattggggttttcacctgctgtgagtctaatcgaatacaaagccttatttgtagctgaagaggaagagagattatgcagagtgtaagaatttctgcccagttttgaaattccgcttatttggcacaatcggtggggaaaggcagacaaatagttacaagtttgagctgttaaggtagaccaggaatgctgtagtcagatatacttgaaccacattaaccagtgatccatttttagcaggaggtggtgtgggtcatatacatgggttatcgctatagctggcaggctaataggtactccaaattctttcccatgaagcaaccgtcggcctgtgaggttaatgaagtatggctttattttagtgaagatgctaaaattcacatctttttagatgttcggcttgatataggtggctctgtgaagctttgagaaatcttattaaaagaaaactgtgtgagagtgaagcagagctcgactttatctggaacctgtctggtgaaatctctggtttagatggcagctggctcacagagaactttcctgagtctggcttactctgcctccctaaagagacagggcctggaaaaataggcttttgtgtgggtgtgaagtgctctgtgtctgaacttagaggcctcttcatttgctggttaatgtgacctggctggatattcttacatccagaagatgttggtttcagattgatctagggggattgttatatatatatttcaattagtatgctataatatttgccctaaccagcaatgattcaccatacaccaacccatttgttagatgtctgagtcactgttcatggttagtacttgtactatgcaaagaggaatatggaattcttatgtctttattgtatacccaaatgctgacattttactatagaatatgtattcgagttaattgaagtgatacctatactctaaatgaatttttataaagtgatgcaggttatactaaaacttagggcgcactatagatagagagaagctgaaccctaggagttggtgaagtctctcgggaccatccctccaggcaagtacccagttcaaaccattccttgtctttgtcctttcctatgccactctgcatttttacacagctagcatcaggccaacattgaaaccacatgcaacccagaaaggaaaaagatgtgtttgtggaaggtaggaacagcctagtttcagctgttggcccttcacagcctccactagatgggctcattcgaacccaagacccttccaacagtacactgcaaatccatagctccaattcagacatcttccctctgagctcaagactcagatgtccaactgtctcttggatacctgcacttttacatcaccacctccaattcattatgttcaagactggattcatcatctctttcctaaccctcttctgccccctcctcctgaaattcctagctcggagaatgctactcatccaatctttgttgtcactcaaggacaatggtccttaaccttcactgcatattagaatcacttggagagtcttagaaatcctaatgtccaagaccaattaaattagaatctcagggtggtgagacccaaacatctaaatttattaacaatccctgagtgattccaaagggcggccaagcttgaggactattgctttacttcttccctctcttccattcatacatccagtcagtcaagactcctgtagttggaaccttattgtatcatttctccacctcctctgccactgctgtaattcagatcctcctcatactgcaatctccttgtacctgatgtctgaatttcagactcttgtcttctgatcaagcccccataccattgcctgagtgatttttctaaaagacaaaccggacagagccacactcatgctttaattctttcttccttaaaaagctccctcatacctttcaggatacaagtcaaactccagattgtcacactaagccctttccagtttgcccatttctctaacccttatcttgacattctctccaaaagatcaagcagaccgttgaagctcttgtaaagaacaagctggttgcatcctttttaccctcacatctgctgttgtcaccatcataattgttgatatgcctttaccctcaaaaggccagaagctctttgtgggcctacagaggaggcttctctgaatatttatccaatgactgagtctcatctgctttttagccccagagtggggggatctgactttctcctctatcagtagtccccactcagcatcaagtctattgccccagagggtggctttggctggatgggtctcagtttggtcagggtcctgggagaaacagatggtacattcaaacggaacacttgaagagagtataatgaaaaggctatttacaaggctctaggcaggctaggagaaaaaaaaaaaaacaaggaatggtaaacttttgcccaaagggataaagggaggaatggtttgcgtaactggtggaatgctattgctgtaggaaaggactggccaacaagacttgtggctgcaggtcaaggaactcagcagctgccaggccagagatcagtaggagggaacctgaagaataaatacccaaacatcaccttcctcctgtcctttcctctccttctgtaggcctttcatcactgcctcccaattggctgaaagcaaaaggaagccaaacggcaggaaagcctgattgatgtccccacagaggtccaacctcctgggccacagagcagaatggagaaggacaaagaatagagatggatgggagaatggggaagcatcctgcacagtcccttaggtcagagatgcccttattctctaaagataccctcaaagtttaagtggttcaaagaccagagttttggctacgggaaaatgtactgggtcgccttctttgacctcatcccatttcatttcttctttatctctatttctagcaaatttactcttctctgctctgagccatcagtgagattgtctatgagtatactagaaaaaacacagacctttctcacaggaaaagaagccatgtctcttcatggcagcatagcagaatagctaagcgcatgagtcttcgagctggattccccaattccaatccttgcaccattctagacagtggtactgggaacaagtaggtcatggctgattctgaagtcaaaattttagctgaagtttgttctggtagcagagcttcaggctcttttcatgtccgtggttcatatcaaaacagtaataataataataataatataatcagaaggaggagaagaagaaacatctactataaacaaacaatatattatcatacatggcatcactacataatttacatatgacacgaaggtatatcaattatgttcttttccaaatgctttcctctaataagcaaaattcataatctgactgcaattgaacaacaaaacagtctctgtgatgcccgcgtcatttcttaatactttcagtatttaattataatatgacgtcaagatttgggaacaagtcttcaagtgcctataactccagtctaaaaaagaacttaaagatgtatttttgaggattgccatctgtcaatttttttaaaaagtctgaatagtgatttcttattccattcttttttcttgtcaacagattattcttagtagttttctaattggacactgagaaaagagacttaagcatttatagagaagcgtgtcagaactcctgaattttgagcaggtaatttaaaagtgtaaaacaaacaaacaaaaaacaggaaaggaagagagtgacaaatgtcttactatccaggtgttacaaatccttagtttatcgatttgtaatatttacaaatgtccatgctctgaggcttctgtcttttcgttgaaataaacataaacagtagttaagtgatttgccacactgacacagagattggtgtctctgatttactgcaaagggcactacttcctcattacaggacactaatccctcttccccaaggatcggagcagacctagaatatactattagaccaagggacaacttcagccaaagcaaatcttagtgtgcccccctcagaccgtaatagcagctgcctccacaactcactagcttaaaattgctaaagggcaacactaagtaatctcagtgtatgagccagaatgccagaagaagtgccatatttgcttaaaaatagcaataccgatcatacttacatgcacatatctttagtgataacatttacctttatatttggtttgttaaaggtaataaagaatcctggcattcccttttgcttttgtccagatactttatttttgcctcttttgccatgctatagcattagataaagcaaaacgggtgtgcttccacctaaaacattctagggggaaaaatgttgagcagaaaaggattatttcaaaagaagccggatatggtggcatgcacctgtcatcgcaggcacttggaggctgaagtgggaggattgcttgagcccaggagttgggagaccagcctgggcaacacagtgagacccccatcccttaagaaataaattttaaaaaggggaccacatttaaactgtagaccgaagtggaatgaatcaatcggaaaggagagtggaaagcaaatgtttgaaagaaaataaaaagaaaagcaagccaacaaaataaatggacaaagaagggcagtgaaaatatcactaacagtttatcgtaagatgctctttggatgctaatctaaggtgttatgtgaagtttgcagaaaattcttgtgctaatgaaggctttcttcttcttttgagtatttccaagcttgaaataattgtgtgtagttaacttctatcatcatactgcaaactctaaaattagaattatttgaactgttcaggccctgtaacttttccaataaaatattctattagaaacaagttccttctagatcttcctaaaagaatactaaaggaccaaaccgtgcaacagcactggtggtattgtcttaatttagagagtccataccagtgattctcaaacattagtatgctcagagtttctggttcaataggtctgggccgggcccagggaattttcatttctaagaagttcgcaggtgatactgataactgctgttcccagggtctacattttgagatccgctgctatgtcacaaatccaaatccaaagtctttttaacaatcccttttagcccaggatgagcctaacggcaatttcacgtccttatcgccggccactttaatcttcaactgaggaggaagggagagtgagaattatgtatataatttttttcttttattttttaaaaagaaaactccaagcccacactcttaattatctgggatgaggtcatttgcacctgggtcatttatttagacaacaagtagtcttgctagaggctttaaggaggtgttagcagagcggtgtgtggcttccaggttcctgggtctaccttaaatccccatcctctttctttctttctttctttctttctttctcttttctttttcctttccgttttgaaagccccaactgcccagtctctgggtgtccgggttcccaggtccctaggtgggggcggagcccgacacggccccgccccgtctgcccgcagcgccccctccccggcccgcccgcgccggctcctccgcagtgctttcagctgtgagcttgggcggcggcggcggcggcgctccactttcggggagcccggcggctctgggaagctcactcctccactcgtacccacactcgaccgcggagcccttgcagccatgagggaacagctcaaagggtaagtggatcgcggccccggccccgtctgatggccgcaatccgtgcacttgtggcgcgagcagggggcaagctgaggcggtcaaaacttggacaggcgcggcggctggacccggggcgccgggcggctgggcgtctaggaacctctcccgcgggttcccgcggcgcggctgcaggtgcgcccccggggtttctccccaggcgccgggctagtgggggaacctcttccctcggctttgggacgggctcggagagaaaaagctgatttctccccgtccccagaggggataacgcgttcctcacgcggggattggggccgggggagcttttcactcctttccaggctgccagtgtggacgtgagcaaggctggctgttcctaaatcgtcgctcttactcgtagaaggaaggggcgcacgcggcgctaccttccattgcactgcaagtgccaaaaggtcaactttctgcctgatttcttccgaggattccaactgacatttccctcgctgcattttctaccgtgctcattccatgccccaagacctgcagaaatcaggaaagaaagaacaaacaactaaagcccagaagtcaaagatttcagggggtggggatttttgtttgtttgggcttttttttttttttttttttttttgcccttcgggattgggtgtggagtcatttctagggtgttctctcgcatttctccaggtgtctgtgctcatcttcaagcaaagtttgtcactcccaatcccagcacggcaataaaaagggcagaacactttgcttatattagtcaaatttgaagttaagtttgaagctttaaattgaaggggtttagttgctcgagggaggcataatattaattataaactgtttttacatcatgaaaaaaatccatccgatttaagtggtgaacttttaagtggcgtctttaagtgaaatctacatttttccttgggcaataaactcttcttggtcttctgctttatccctgtcatctctccttgtcacccaccccccccccccccacacccccaatcaacctttctttttttgcctagcttttttattgccttttactcaagcccctctttggaggatacatttgctgttggagaagcgagtggagcaaatgaagcaacacggttatatgaaaggtctctgacccttgaacaccgtggaattggtttcagtcatcattgtttgatctccgattggacacgaccctgaaaagaaattgctttgaccaaagttgagggtgggtaggagttaaaccttgaaaagcaaataaaacggaggacaactaacagctggaacagccaccgaggcaatcatctttgccctggctttagccagacagaataaaatggtaaatatcccagggaacaagaaatggggaactagaatggatttctgatgcttatattgatgcccacccctccaaacccctgccccacggtagcagaaactttaaaatatattttaccatccacaccctgccagtattccagcaatgcaagccaagttcaacaattcagcacgcaaatgccaaggttcctctagaaaaagagtctgatcctcagattaaagggaaatcatttgtgtgtgtggatcaatgggctccagattatatatgaaaccaaactctaatcctctgcaaatcgcaagagaacgctccctttttatattgctgcatagcgattagttttctccctgggaagtagtggacagatagttttttaaaaaggcaactgtttggaatattttcagtaccaaataacaatggtggcagaagaaatcttattttaattaggcaactgccattttcccagccacagcagtagatatttgttactttttataagtgtttaatgtttgtttttaagaaactaaaaaagcaattccaataagtctgattattccagcactgacagcaggaacagctctgaggcagttataataaccttgcacactacttgaaactaaagcaggtgagagaaaatttaaattgtatggtaggaaattaggtcagccttgtgctcagtagagtaatgctttaatttcttattattgacaagtaggtgttgctggggtcttttgtcatagtcgatgactttatattttaatttgcatcagggtcctatcaccgcctcaaataaaagggaaaaagattatcatggtttgtagaaagaagaaggagaggggaaatcttcgtataaatactgctcagagaggcatatctgatgccaggctttggaaccagcagggccaaaatcaataacattttttaaagatgtaaagagcgttttaaggattatttatgaagctgatctctgtgttaatgtacgtacagacttgtgatctatgttgaacattgttgttctcagaaaggccaaacaaagatgtacccattaacatgtgaacaggtttcagaatttcccttttggttgttcatggtatatggggagtgtatttccgatgtggagagtgaaatgcagaaaagagacaattaccaaaacagtgccacccacccttccactccctcctccctagcacaccgtgtttttctatatcgtctgcatattccaggtaaatgtgggctcttctcatggagttactgagaattctctactgttttagaaggcaggcacagagtaagaaacgaagctgtaaaatcggtattgatcacagacaaaaatgtggtttgtccttcaaggtacaagatagatatgagttatgcagatttgtgcttacagtttcatccagtccatattcatagttcctatctattttggagggttaaatgtgtcccagtggggctctggattcatcacaggtagaaaataacaagccgtgaagtgaatatttggttcgtcatatagttaccaaagaatctgaaggttttttggctacgttgccaagcatttttagcattaaatgattaaaagactatttttctcgttttaagaattagtcacaccctttattcttttcttctttccacttgtgctcacttcttttgcttagaactgatttgcaattgaagtgaaactaagactgcaaaggtgaaatctaaatctgtttttctagttcttttgcattgcttagaaataaaaggtttgtgtgttgaaggtgagaaaggttagcttctggaattgtttgaggagttcatttatctatgttattcaagtcccccagaatcacagataactgggagaatagtacctatcaaggactagtatcttaactcacaaatgggcaatggaattgggggcttagaatttcctccttcttccagtaaaggagattttcagttttgccgaggactgatggattaaaaaaaaataatttctaaaacccttttcataattttaaccttcaaaataaattctttaaaaaggcaggaatgtatgtatgccaacagtcatgaaatttctttagaagatggggagctccatgaagccctcattcattctatgtgggattctcctgtaaattgtacacactgtttccctttccttttagaactgtgtttggtacaggtttatttcttgcctatgttcctctaatttgaagtccattccagatggtggcttttcaccgtggttccctgtctctgtctgatcaggcttatcagctcagctaaatgtttttctgcagacctatagaagatgctacggtccttacaaatatcctggagatgggacattgttgttacacagtgtgactagtaagggcctgtgtgagcccttgtacatgtgggcacacatgtgtgtgcttcctctcttcgctcttcctttctccctggtgcttatatcacatctggatgacctttggaaatagaggaggcctgaatgcagggtggtctcaatagaaggtaacctttccttgctctgcacttatatatggaattggtatacactcactttccgagctgagaaatgcctgagaacaagcaacactttttccacgaagctgcaagctgcagcctccttgtgctgtgcatgtaaagtaccagtcctgcctaccccttctccagatcataaaccggcttggtcatggggtgtcctaaaaccccttaaagcatagagaccatatctcctgctcttcttgctctttaagacttgaatgtcactctgttatattccctcaactgataagcccttgttatagtcctcaaatgtgagttgtctctatggaaaagtaaaactgaaataaacgtatttggaagacagtgaaacagcacttcacaagtgaacattttcttgcaaattgatttcagtagccctcactgttcaatcactgactagtaaatattacagggatggtctttgaagttgtacagtttggatgatttccatatgtctttatgaggtttatgattgtgttccatttcttaaaccaacttaaacggttgttttaacttattttttttaaacataggtgataacatgtagtgtgttggttttgctctctaggaagggtctttcttcgccttgattgacttaattacagttggatccacatctatattgtaatcaactaataacagatttgcttttaatagatgacaatttgaggggcacatgataccaaaagcgaccacatattgagcaccaaatggtgccggtcacttacctatttcaactaatcctttaaccctccaaggtaggcaggcttgctttaaatttcaccgccagtagggcgcagagccctaaaattcaaaacatacgctaaggccattcgacattgttgcctctccagactcctctttctgtgtgaggcccctgtactttctggtcctctggaaatgccccagtttaagcgatttctcttttttccttccctccccttcccctcaaaagtttatgaataggctctgcatatgagtacccaaatatcattcagaactgcattttactgtatcaaagcctgtcatgcaatccctgaaaactggaaatatgacgctatggtgatttatgtagatgggccaaagtaaggaaaagtatatgtagttatttctccagggtttattcatgtaattgaatgaggaacaaaggtgttttgttctttttgtggcaggagctgatagccagcaaccacacttcaagaaatggaagacagctgtgaatgcttcattcaggcccaagtaaatataggaagaggtgtagtggtgtatagcgtactgcgtttaaagaaaaaacactctgaaataatgggaagaaggaagttatgatatattagtcaggcagtagatataccttaagctgaaatgaaatacaggtatcatggatatgagatctgtatatgtagaggaaagagtaatggaaaaatgtcaggggcagtgaaagcaaatgagaagtgagatgatttatatttattgaactaatgtccggtatctctttgacagagttgaataataatcagttgtcggtgtcctttctgtagtgttccacattggatgggtgaagaagtcctgatagtcgattattgatcacataacaaggtcaatttatcataactgaagtgcgatcgatttgtgggtgcaaagaagaaacaaattctggaaccgaataatgtttatattgcttttctctttggaaacaaagcagaaaggggcctttctgcttgtaagataaacatttcttcaatacactatggaagcgctttgaaataaagattccgaatggttcaaaagcaaaaatcatgttgttgttattgttgttttcttttttcctgttttcttgactactcattgtaaatgctaaagtctttctttatgttttgtgttttagccacgagactcaaacaacttgctgggaccatcccaaaatgacagagctctaccagtctttaggtaaggacatggccatgtttcctccaagttaaatgacaggtgacctttaggataaagtagtttgcagtgtgaaagttacttgctatataaatacatcactagattgtttcaagggtgaaagcagtggcaccttcctatccaaaattgacagtcagctttctttttatcagaggttccttaaaaacaagttttagaagttgattgattcctaaaaattcaatatacctgagagggcctataggtctttgtagttctctttggtgcctaaaatgatggaaaaacagttgcaatttatggctatttttttttttcttcccacgaagatagaaaactgtttcaggtgcttgttgatttcttccgtgtgaaaccaagacaacccttttgccaaaccacaaatgttgtgtaaaggaattttctgccgtctttccggtgctcacaattcctaaggcctggcgggtcattaatgtgaacatttaaatgatttctttagtatggcttgttttgtgtttatgtaagagcctgacagttctgttttctttcccctcataacttgaattattttgaatgggtacagagcatacaaataagggtttgaaaacaccagtctttttacactggacaaatgtccagatgtctggtttgtcgttttagatctacaaggaatattctgaaatgagttatcttaagttgcagcttgttttgggttttgttttgggacagggtcttgctctgtctcccaggctggagtgcagtggtgcggttatagcttattgcagcctcgaacccctgggctcatggcggttcttctgcctcagcctcctgagtagctgggacaacaggaatgcaccaccacacccagctcatttttaaaatttatttttatttatttttgtagagatgggtctcactatgttgcccaggctgtgtttttatgtatttttttaatataaaaacgtcatgtcttttctactttttcaagcctgcatttctgtgaatggacatattgatagaaaaacacataaggcgatctctttggatttaaggttatgtgatgaacactgtgggaatcagggtacttaaacataaattctgtgtaggtatacgtaagtggggtgtgtgtgtgtcagggggtacgtagctattactgcttttgtgtcatagattctcacaaaatgaattgcagctatagagacaccaaggactagagaagagatattagccaaaaaatggttttattaaacatttttctaattataaatgattaaatgtcttctagaaaacctgaaaaatgtaaataaaaaacatgaaaaaggaaaaacaaagtcacttatactagccagagagatccaatacatttcgagtaatattatgtcatttcagtctggttataagtgtgtaaacgtttaaaattttaaataaaattgggatcagctaattttcaagtgctacatttccagcccctacagaatgtttttggcttataattgtggactgtttataccacaggtggaaaacgtgaatgcttatcttttggcaaatgagagaatgaaaaggcttcatctgaagtgggcagcagctgtcctgggcaagctggtctttctatcccagtactcccaggacccctgattgtacaagagaaaaactagaaatctgtccacaaagagctaatttaaattagtctgtgggcctcctgatcgtaacctgtggtttacacagatttagcccacttctaacatttcctactctaattacagtaatttctagttgtaatattttaattcactcttattttaaaatcattattattatagaattaatacctattcatatttttgaagtttaaaaatatagacaggctaacaataaagaagagacaaatcattcgtaaccccacttcttagagttagctggtgtttaatagtctaggatcttcaaaaatgtctttctatacatatatttttatagaagttgaatcattctgtcttataacttgctttttttttttccactggaaagtaatgtattaccatggccatatttccattttgttgtatagtattctctaccactttcaattactctgtaatgagaaattgcaaacatgtttgatgaaaagctaattatggactatcaatgaatacatgtttgctcctttaatacaaattaaatatacatttaatcattatatttctaaaattttctccatactttagatgtggtgataaactcaaaactgataatctctcatgacttgtgacattgggcttgtgacatcactcaattttgaattataacagaattttacagttgcaggggattttagaactcatttattgcaaactttctcttttatgaaatcaactttcaggtataatttttatataataaaaggaagtcatcgtaagtgtgtgatcaattccagccccctttgaaattctgtttcttgctagcccaataacaaaccacttgcaagtgaactaagtgttgaagtttgcttttcacctttcagagttaatatttccaatagttttgtaacaatcaaacattcgttgggcttttatccaagtggtgattcatcagataacatctcccatttattgcgggcctattgtatgttttccacatgggatgtgccagcaaccaacctgcatggtggatggtatcaacatccacatttcacaggacagcgaagccaggctcagggaggaattgatcagggctacacagctatgtggggctacacctggatttgtcctcagttttctgttagtactttcactgttctcattgattttatttactaggtaaagtatatttatgttggttactacatacctgctacacgtatataggaattgatagttttacctatgaatagtaagttacttgagtggtatttctggaaatggtatggtgggtcctaaacaatgggcactcctttcactgttgcctggcacatatagaatgattgttatatggctacatccttttttgtttgtttgttttttgagacagattctcactctgtcacccaggctggaatgcagtggcacgatcttggctcacggcaacctccgcctccccaggatgaagtgattctcctgcttcagcctcccgagtagctgggattactaggcacccgccaccatacccagctaatttttgtatttttactagggacggggttttgccatgttggctaggctggtctcgaactcctgacctcaggtgatcctcccaccttggcctcccaaattgttaggattacaagcgtaagccacagcgcccagcctgcctacatccttgagatcccatataagattaactaccagcactgcctttccccctctccaaaattacagtgtttcagagtcgaaacataagcataaaatactgaaaagaaacttttcattgattttagtttttacttattagtttatatttttcttcttcaagaggtatccctttaggtccaaattgctctttgagctggatgaaatggtcggaagccttcaactacagtcagttggtgaaaggtatcttgaaagcagaaatggtgttgtggtctggcgtgtcaaatgtttaagaccacatctagccccctctcctaatcgaacctgaacctcatgtctctggtgaggtgctgaaaatatcaagatgttgctttttccctctgtacccccactccaggcatactctaccgtggaagctacagtggttcacagtatgcatggtaggttacacattcctagagacgcccacttctaaggagatttccattctctaatttgccaaagttcccaagcagcctgttcaacacatgtttatgttacctgccttgccctcaaaagcattcaggtgttcccctgcacccagggtttgaacacaataggattagaaggtgaaaacattttgttagaactgaaaaagtagcaagtatttactgatgaaaagctataatattgcttgagatattaccattggagctctctaatacattctgggtggttttctttttcattccttttccactgattttctacaatgaatttatattatttacagttagatgtttggtaaaaaagtttcttcgtcgatacccccattccatttcttacttagtgtctctatagctacaattcattaactaatgagaacttatgacagaaaagcagcagtagccacacacacacacacacacacacacacacacgccccacatatatgtagataatttatacttaaggaccctgattctcatggactttgtcaggtaactttaaactcaaagagatcatctcatgtatttttagtctgtatgtccagttgtgaaaaatgcagatgtagacattttagtggtagagaaaatagaacttttttgattaaaaaatagataaaaaacaatataagataattaattttagattatttccaacagatctaaaatggctttgcagaggaggtttccatcaagtgttagaaatattgtgtttccctcatttatcggctgtgtacctacacaaaaaattgagagaaaatattgccagagtcctacacaaacaaagcaagacatagtaaagaaataatttaaaggttcactatgatgactgaacagtcattaggaatttgagtccccagaaaattttttacatcacattaatggtttgacaaaagcattgtcttggattttcacagggaataaatcactaaaagcaactggaaatcagttttctttcagcatttgtctgtgactacccccaatagtcatagaatggtagtagagaatagtagtggagtaagtgggatataagagaccaagtgtctcatgtctattttttgtagaccttggtgctttatctttaaaatgtgaggatattggggctgggcacggtggctcacgcctgtaatcccagcactttgggaggtcgaggtgggcggatcacctgagtcaggagatcaagaccttcctggctaacatggtgaaaccccatctttactaaaaaaacaaaaaattagccaggtgtggtggcacatgcctgtaatcccagctactcaagaggccgaggctgaagaatcacttgaacccaggagtcggaggttgcaatgagctgagatcacgctgtagcactccctcctgggcaacaagagtgaaactccatctcaaaaaaaaaaaaaaaaaaaaaaagtaacgatattggacaagtgtctaagatttttgtttttcttttactttgggctgagggtggggcaggctgtttctaaacttgctgtgatcattatttttcaagaggtacctttcggctaactctgcagacaagtggatttctaaaaatgtaatcattcctatgttttaaaatgtacattctgagaaaacaaacaacaggagaagattatgccacccatccgtgtcttacaggctgagtgaggcaagctgttgtcaaatagagaggctcttgagatatttcccattagactcctctgggtcattcatttgttattgagagggtacattcttcgtcactccctagaagtaataatatgtttgattcatgaggtgagttttagatttctattagcatttttacaaatgtaatggaaagactgttccaataggttagcttggtgatttaaaactctgagctcttcaaggctccagaaagcatttacaacatcagtagatgttagatagtaatatgctctggaatttattttgaaatactaatataatattgatttacatgaagtgcaattatgtggttaaaagcctgtccttttctcacaatttatgtctaggtccctaagttcattactgaaattttaagaaaatattttttaaaaagctcaccctgcccccacacacataatatatgctgcttagagatacttttattggggtttttttttttttttttgacagcatcttgctctgtcacatagactggagtgcagtggcctgatcatggctcactgcagctttgaacacccaggctcaagtgaccctcccacctcagccttccaagtagctgggactatagccgtgtgccaccgtgtctggctaatctttttttaaattttttgtagagatggaggtcttaccatgttgcccagcctggtctcaaactcttgggctcaagcgatcctcccaccttggcctcccacagctctgagatcccaagggtgagccactgcacctggccttcacaatttccaatgtcaaatcttactacaaatttaagtaatcaagagtatttacatatggacagatatactgaccaacagagtagaatttaggctgggcacagtggctcacatttgtaatcctagcacttttggaggccgaggcgagcagctcacttgagctcaggagttcaagaccagcctgggcaacgtggtgaaaccccgtctccccatctctacaaaaaatacaaaaattagccgagcatggtggcatgtgcctgtagtcccagatactcaggaggctgaggtgggagggtcgcttgagcccgggaggacgagactgcagtgagccgaggttacatcactgcactccagcctgggcaacagaacgagaccctgtttaaaaacattatttcttagcctgtcttattgggggggggtctcttaattataaatacaataaaatatgtggttccccaatggttcctttttaaattacaatgtgagtttttttgcatttgtgatactgtcagtatagtacaagaagaccagtttatgaaggagacatgtaggtaaaaataggataatgtgaagagagaatcgctgcacttcagaaagctgattttatttcaagcagtttattaaaatctagatgcaccgtatgttctggtgttacttattccaatttccttttccttcattgaagccctcttaaccacaagtgttttctcaaggggtactggttttccttttcttaagttatagcgttcttcagaaggatctagccctttttaatctgttgcccaatttttggatcctactatccagcatgatgctcacctgaatgatgcgaaagctctcaattttcaaaaatggacttctgagtgtttttggaattcttaggaaaagtggtctttaaaaaccataagatttgaaggcagtctatcagcacgtagcccttagcttcatgtctatggtttgcagagagcttcagaatgttaaaatgagggtttaattttagggtctgctgggcctgaggttaggggtgtgattcttcagcagttctagttaggagaactagttaagtcctagttaagtcaatggggctaaaagctttttaaagatacatcaatatcattataaatcagcaatttgcaagagagttaaaaacactgctatcaaaatccttgtacctctttcctcagcttgcccaagaggaagggatattgtagttatttgttcactctcctcttttgataggctttctacattccattaagtattccctcctgaggatgctcttgggttagaaactgcaggattctgaatgactatgaattccttccttttgcattaggagcttgtcctaatgcttttctcagcatattttgtgaactaaactgttctccactaagctactcaatatttagctttccttggctcttgcttctagttccttaatatattgctcagtgttaaaacctctgccttttgactttttactgccataacgctttgaactggaaaggatagctagattcagatgccagctttggtgtgacctcgggcaagtcccttgctttctattggtcttcattttcttatatgtcatgttggccagtgatctttcatcattaaatgactggttttgttttaacccctggctagagtaaagcttggttgtatgaatgttgtcagccctaaacccccagttcctctttgtcaccaccaacctaaaggatatgaataataggataatcatatttattaatttaattttttttttttgagacggagtctcactctgtcgccaggctggagtgcagttgcacgatctcatctcactgcaacctccaccgcccgcgttcaagcgattctcctgcctcagcagcctcccgccaccatgctcagctaatttttgtatttttagtagagacggggtttcaccatgttggccaggatggtctcgatctcttgacctcatgatccacccgcctcggcctcccagagtgctgagattacaggcgtgagccaccgctcctagcctataatcatatttgtaataattgtactttatttgtgtagcactttacaatggcgaagagttttcagaaataaccatatttaatcctcacacagctatagagtaggtggcatatgacctggattttctatcaatttcagtttcagattttttgtcctgtcatccctttgagtgtccttccagtttttgatttgggaaataatgctaccataccggtggatggggcaacttttcccttctttccatttggacttgagcagactgagactcaagacttgatttgatttatactcactatggtagaagataaggaaccaagtccagaacacacattttacaaactccgagttctctgttctcaaaggaacatccattactcttagcatgatttataaaactgctttatcggcataattaaactggaatccatatgacattctttattccctagctgacaaaattagcacaggagatttactcaaatttgttattaaggctgttataaatgttcttcctttactattcagcttataaaagaaaaaagaaaaataatctgctcttttaactttgattaggatccattgactttccccatttgtaaaatagaaatgtaacttccaaatcaaaatttatggcattttaatggactgttctaaatattataatattttttcttgttcaaataacttgatttaaagcttctaattgaagaacataatagatatttctgaattgcatctctccaagcttatttcagaaggaaactcaaaaagaattgttccttagactttgactggtttacagttttaaaagagctgccaaattgtagtttactgatctaaataagaggaacattaaggttacacctgcagctagaagaaaagtgctggatatgtacaattttatgtagctggatctgcagaagatgatttttgcacacagagtaaaggcatctaaaaacgtgtctgctcttattcagacatttccaatatttcttttttaagcccacaagtctgattacctctgtatgtctcttgggagctgcaattttgctggaaagagattcagaacagtcagagcactcacataaaatagatagtttttaaagtctgtaccctctacggtagtaataaaatgacctaaaaatattctgaaagtctctcttatgacatagtggatgaatcattagcttatttatgaattggtgatattctgtgggaatgtttcaaaatttgctattccacaaagcgttcatcgcttgcataactccaggaaagtcattacaccccctcataaatagaagcttatataacggagacaaatgttgcttatattgatatatttacatacagatttctttaccaagcattaattttggtaagaaagtgattgtttttatattttactttcttggtctgtaaagaggctatcactttaaggccaggcatggtggcacgcacctgtagtcccagcgcttccagaggctgaggcagaaggatcccttgagcccaggaatttgagtccagcctgggcaatatagcaagacgttgtcttagaaaaaaaaaaaaagaagctatcactgaagagcagtgcttctcaaactggtgaagggccaggtttttgttggtggtgggtttttttttttgtttttttgagacagagtcttgctctgttgccaggctggagtgcagtggtgcgattttagctcactgcaaactctgcctcccgggttcaagcgattttcctgcctcagcctcccgagtagctgggattacaggtgtgcaccaccacacccagctaatttttgcatttttagtagagacggggtttcaccatgttggctaggatggtctcgatctcttgacctcatgatctgccagcctccgcctcccaaactgctgggattacaggcgtgaaccactgcacccagccgcggtggtggtttttaacatactacacatcacagatttttaggtggtgctaatgaaactgacaagtatgcattcacaccacatgtaactcaacagtcaagttcaacaacacttgacctcgtctgtaccctgctccatgagatgaattcattgatcatgaatttggatgtcatggcaatgtcaaattgctatagaagttacttaacacactgtccatatctatgcttgtgaaagaccatattttgagtagcactgttctagagcacttaatttttgaaagtataaatgtaaactcaaatcaagtgactcaggtcgggggaggataattaaccaaacaggaacacctgaaaatgttatttatgcggtttaatgttttgccagttgagtcaagttcaggcagaggagggatctattttctttcccacttggtagctctccttagcaattgttttagaagacaaagcatagaaatcattgtgttacaggaaggaaccagagattaagcggcagagccactgctgcctagtttaatgtctctcgcaccccctataattaaatataatgtatataatgtgataagtttaaaatacaggtttgcttttatctagaatataaactgtgatatatgcactctttatggggtgcattcagtgggggaactaattgattatactgtgactttcctattgtcactttatgagtttaggtttggaggcaatgttttgcagcaacaaaattgttcattgactttgaggctggatttaaattctgattctgtcaccagttctctgtggtcaaaaaggaagccactaataattttaaacctcagttatgtgatgtattaaatagttatgatgagacttatcttgtgttgtgaggattagaatgacatatgtaaggtaacagaatgtctgatgtagtaactgctcaaggaattataattgctattagtgatatgcattattattattagttattattatcatataccagtgtctctccttatttaataatctattgggttcctgaattgagataccaagaattcagatagtgagagacacctaggtttaggtcttcacatttgacactcaaggagccactaaatttttctgaagtattttacttcttaaccaaggtgataaagatcacctgatcacaatttatcctaacttttggaaagcatacacgtactttaatttgacatgcaaattaaaataatacattttgtactgtgttgtttgccctcccccaattctaaaataatatatcattcaggataaaaaagactacactttgggaggccgaggcaggtggatcacctgaggtcaggagttcgagaccagcctgggcaacacggtgaaaccccatctctactaaaataaaaatttaaaaaagccagaagtggtggcgtctgcctgtagtaccagatactcgggaagctgaggcaggagaattgcttgaacctgggaggcacgggttgcagtgagccaagatcgcaccactgcacttcagcctgggcaacagagtgagactctgtctcaaaaaagagcataaatatctaataaatgatggtggtactagtctgtggtagtggaggtatcacagaatggctgtagagatgaggagggctaaaactgtgaaaagccttatatggtatgttgaaggttttttatactaaggtttttgatttggaagatgtatcaatcagggtctgcctggtcagaaaacataaaccctctagttatttcaaacaaagggaatttaatgcgggaaattggttactcaagaatggaagtgctgagaagccacacacacagcatgaagtttctgttatacctagggctggagggacaatgacaagaggtggtatcaccagagccccagatgtcatgggcatcaaggcggagttggaacctttggccagctgggaccaatgagggaggggctccgagggagctggagccaggaaggagacacagttagccagacctattgccggaggtagaatgaaaaaggaagtacgcccggcttctcctttccgcctgccctctaggcttctgccagtgactcctattggccaaacttacttggaagccaattggtaagggagcaggaaaatgtactgtaataaacagcagagcagagaaaaggcagagaaagtatcaaaaaccaacaagcaaatgattgaagtacaggagatcccatggacagtaaggcaaccaaccctctatgcagatatttcgggaacaagaaacataaaaaaactaaaaagctttcataggagtttgaggtgacatagataagataccagaaggacatcctgggttcaaaggaaactgatcttaaaggagaggaggtagcaattaaaacaaattatctgcagagaagtccaaacactaaggataagcttccatgcatttgatgaaagtacttgcgacgtttacaggtgtttatgctcatgactctcaagactaaatacagacataccttggagattttgcaggttcagttccagaacacttcagtaaagcaaatatcacaataaagtaagtcacacaagtgttttggttttctagtacatataagttatgtttactctataatgtagtctagtaagtgtgcaacagcattatgtcttaaaaaacaatgtacataccttaatttaaaatactttattgttaaaaaagctaacgatcacctgagccttcagccagtaatgatccttttgctggtggagggtcttgcctcgatgttgatggctgcacagcatggtggttgctgaaggttggggtggctgtggcaatttcttaaaataagacaacaatgaagactgccactcagttgactcttccttttgtgaaagatttctctgtagaatgtgatactatctcatgaaaccacttactttgctcatccataagtagcaactccctatccattaaagtttgatcatgaaattgcagcaattcagccatatcttcacgccccacttgtgatttcaattttcttcctgtttccactacatctgcagttacatcctccactgaagtcttgaacccctgacagtcatccatgagggttggaatcaacgtcttccaaactcctggtaatgttgatattttgacgacctcctatcaatcacaaatgttcttaatggcatcaagaatcacttccagagattttttttttttttttttttgagacacagtcttgctatgttgtccaggctggagtgcagtggcgtgatctaggctcactgcaacctctgccttcctgggttcaagtgattcttctgcctcagcttcccgagtagctgggactacaggcgtgtgccactacgcccggctaatttttgtatttttagtagagacggggtttcaccattttggccaggctggtctcaaactcctgacctcatgatccacctgcctcggcctcccaaagtgctgggattacagccgtgagccaccacacctgacttccagagattttccatttactttgcccagatccatcagaggaatcactgtctatgtcaagctatagccttacaaaatatttctcaactaataagagttgaaagtcacaattttttcttaatccttgggctacagaatggatgttgtgtaagcgggcatgaaaacgtgaatctctttgtacatctccatccaagcttttgggtgacaaggtgcattgtcagtgagcagttatattttgaaaggaaacctattttgaacactaggtcttacagtgagcttgaaatattcagtaaaccatgccgtaaacagatacgctgtcatccaagctttgtttttccatttatacagcacaggcaaagtagatttcacataattccttttttttttttccttccaagacggagtcttgctctgtcacccaggctggagtgcagtggtacgatcttggctcactgcaacctccacctcccgggttcaagcaattctcctgcctcagcctcctgagtagctgggattacaggcgtctgccaccacacctggttaatttttgtatttttagtggagacggggtttcaccatgttggccaggctggtctccaactcctgacctcgtgatctgcccgcctcagcctcccaaagtgctgggattacaggcatgagccactgtgcccggcctgatttcacataattcttaagggccctgtgatttcagaatggtagatgagcattggcttcaacttagtcaccagctgcattaggccctactaagagatacagcctgtccattgaagctttgaaggcagtcattgatttctcctctagagctatgaaagtcctagatagtatcacctttaaatagaaggctgtttcatctatgttgaaaatctgttgttcgttgtagccaccttcatccatgaccttagcttcatctggaaaacttggctgcagcttctgcatcaatgcttgctgcttcatcttgcaccttaatgttatggatatggcttgtttccttaagcttcttgaagcaacctctactagcttccaacttttcttctgcagcttcctcatctcttttagccttcatagaattgaagggagttaaggttttgctctggattaggctttggcttaaagaaatgttgtggctagtttgatcttctattcagagcactcaaactttctccatatcaggaataaggctgttttactttcttatcatttgtgtgctcgcagggtagtacttttaatttccttcattaacttttcctttgcattcacaacttgactgtttggcatgagaggcctagctttcagtctgtctcatctttcaacatgctttcctcactaagctcaatcattaatagcttctgatgtaaagtgacagaggtatggctctttcttcccttgaacacttagaggccattgtagggttattaattaccctgattttaatattgttgtgtctcagaacaggaaggccagaggagagggaaagagatgggggaacagctggtcggtggagcagtcagaacacgtatgacgttgatcaattaagtttgccatcttatgtgggtgtggttagttgcaccccaaaacaatttcagtagtaacatcaacgattactgatcacgattcaccataatagatataaaaataatgacaaatttgaaatattgagggaattttcaaaacgagacacagacccaaagtgagcacatgctgctggaaaaatgtccatagacatgctcaacacaggattgccacaaaccttcagtttgtaaacaatgcaattttcacaaagtgcaatacagcaaagtgcaatttaatgagatgagcctgtaatgagcctctttaaagcaggaactgtcttcctcatctttgtcaccagtgcctggtgcatggtagcctctgaaaaaataattgttcattgaatgaagcacagtagagcaagggagagtgattttgctcgggaggaaaacaaataccactcaagaagatggaaagatacagatgagggttttctaaggcggattattaaactggcaagatggaactctggagagatggagttctttccagaaagtagaagataaagcctcaaagtaattaaaatagggaatatcagttaagttgtagattttattggcaatttgttatcttagcaaaaccaagtgaactgctattctggaattaattttgccctaaaaggaataattaattgataaggagaaataagacccgtaaaaagtgtcactatggattcagaatttatatgacaaagaaaggaaacactgaacacaatttgatgtgctgatggcctcgttcgttcattggtttcctgcttcagtaaacatttaagagcgtgccatgtattttcaaactttagggcaacaggctaaaaatatcaaggagaaaaacgtttactgagggtatagaagtttttatgatcttacttttattgaacattaaaacatggatgttcattctagaaattttagaaggtgaagtgcaaaaacaaaatgaaaatcacctcacatctcagtacccagaaatagccactatttacattttaaaagattgcttccggtcttctttcctatgcatttttatatagttgtttgagataatagaatgtttaaagtgttgtatcctactgtaatcataagtcttctcttattcttagttcctcagagatgttatttttcgctagttgcagtttattggggtaccacttttgtaaaaaaatatttcccaatttttgaaaattgtgacaaagaaaagtcaaattcgtgttgaatttatggaaggaaatctttaagaatctggaggcttattactaacaagcttctgagaagaaagccaagtaaagtgttataataccttctgtccaacaagctacttatgtataagtgatgttacagaataaagtcagtgtggtcaaaaacagacagtcagttatcagaaagttgataagtaacatttatcctatgaaaaatatagctatgaatttaaatcaatagttttctaccacaaatatcttaatggataaaattttctttaccaaatatgtatggtgtcaaggtgacaaggcaagtatccttgtaaactttccgaattacaggaacaactttgcccttcttagcaagcaattttatacagaaactcaactttatgatgggtttctgtaagttttaatttttataataactgatatgtaaatatttagttacctttaacttatctctccaggtagaatggctagcagactgttttatcttctcaaaacatttgtgtgtacagttcccatgttcttttcaaggttcttgcttctaactgtcagttaaggcttttgtagcctcttacttcagttacattttctggccaagacgcaattaaagaatatagagctgataattatttccatagtcgtttccaatttttctactgttccacgtaagactttgaggaacacctttatgcataacacctttctacatttgattcatgtaagtggaatcactgagtcaaatggtgttaatgtttctaagcttcttggaatgcactgcctgaaactttctcaaaaggctgtagccatttacactcataatacttcaaagtgccaatctaaccatgtccttcccagcatggagtattatttttacttttgctattgtaacaaggaaaattaaaccatctcattgttaatatttgtgtattttttatttctagtgaccacaaatgttttcttttaaatatctgctgggtgtttttcttcttttttgagtaatgtgaaaacaaaacgaagttaaccaaacacaactcttccaaacttttctgatataatacacacttttttgtgtgttatgttgaggggctctagttggtaacagcctcctggttacataaatactgtacagtttaattttttttcagctaaataagccttatccctttatccatccttagtggatctattatctacccattaaattaaattttattctctataccaactcctgtttcttcacattttttaaatatatgcagagccctaaattacagtggctgtcctaataaaaggctattcagttattaacagaaaaggaagattgcttcctgcctcttgggtgaggaagactcatgtataccatagatatggtcagtttacatttacagttttctgtgaggcattgatttttttcccccataaatatggagtacttagaatgttcaaaacctttctctgggtaatagaatgcacaaaagtataaggcatgatccctgttcattgcccaagctggcgtgactctggtcatgcagcggacttcatgatgtgatagaattccttgcctatgagagtgaaggagatggtaccaggtctacttgtggccggtggtggaacacttacattattctaagtcctttctgtctgtagaacccaaatgacaaccatattattttatcttctcttattgctagtggtatcgtttattaatgccaacgtatacccattttgcttttcaaggttactttagatgtcttaggttggaatgactgaaggcttatacattcaaatttatatatgacacacacacacacacacacacacacacacacacatatcttattgttgcctgctatctttctacctgttgtataagaaatcctttgaaaaaagcctatgtcagcttcacaaaagatgttactgtgttttgggggaaataaaattgggaagtaataaaacagttaataaatgttacaagaccgtgtacaccaacttaaataagattaaggtcaaacgtatggtaccttatataggtaggaagagcagtattaattagaataattagggagagttgtttggagagtggaaaaaaacattgttctaggaagaaattttgtaatactcaggtaaagtaaaatgtagggccaagatattccagatagtgtagcagcataaacaaaggtatgaaagactggcttgtttgcgagtcagtgaagacattgttctctgagaatctactccagatttttttttttttttttttttttttttttgctttttgagacagggtctcactttgtcgcccaggctggggtgcagtggtgcgaacatggctcactggtgccacaacctcctgggctcaagtgattctcctgcctcagccccccaggcagctgggactacaggcacacaccgccatacctggctaatttttgtatttttggtagagacagggttttgccatgttatccaggctgttctcaactcttgagctcaagccatctgcccatctcggcttcctaaagtgctgggattacaagaatgagccaccgcgcctggccactccagatttttaaaagggaaatctgattcagtgcccctggggtgaactaagtgccttaaattatagagtgagaaatttacattgcatttgattggcaatgggaaaaacattgttaaatcttcagaaaagagaaataatgaagtccgtcttctgtgttttggaataggaatttggtgggtgagtttaaggacagttagagaggggagagattatttcgttttgttttgaggtaattgacatgatgagggtcttaggatagcaatgggggaaggaaaagggaacgtgactccagaggtttttcttaacaaggtagaattgccagaaggtaatcacagattggacaggttttaaagaaaaagggagttatatgtcttcaaaatttgaaggcgtggtgacacagagaatggtgataccattgaggaaaagaggaaattgcaaactgagcggagcaacagggaatagatatgaatttgattgaattacatacttatgggtttatttacaatttctcttcttagaaaaatttatttttggtggctcatataaatgtatgtgctgccataccataagcatatatttctcattaatcctttcaaaaaccctgtaaaagatatttgtatctccattgtgcagatgaggctcagagaaaataggtaattttctcacattgcaaagcagggatttacgtgtacttttaactcctaaaccagcgatttagcccctcagctatactttcttcctgagaggggacagtggcattttgaagaggaaatactctaaagccatttgaaaaggggaaccgaagaaagagtttggtccacagcatgataaaaatattacttgcacttttattatactttataacaagaagtacaggggcagagaaaggttcctaacttttactgagcaagtatatatccaagatacatctcctctttggagcttttgagatacactatctctcttagttttgcaacagccctaggaataggtactattactgttccctttaaaaatgaacaaaaaaaaaatgaagcttaggaaagttaaggttactagaccaagcttattgggagaccatagtgatgaagaggaagggctttagggtcaaatggatttgaattttacttcttaggcctttggtttccttatttataaaatgggattgaaataatgatatcacagttgaaggtaattatatgagaatttatgttatttattgcaaacatagggtaagcacctaataaatgataacctgagaatttatgttatttattgcaaacatagggtaagcacctaataaatgataaccattattactattattttacagcaaagacataaatagagcccattaagttttcttctctacccagtagtttttccattgtacaatagtactctcctgaaggacagcgggtgaagctaagaatttggaagaaatcccagatagagaaatcttgaaaagaagatagatagatttaatactcaatcattaaaaaaagtgcacatgactttaagaaatcaaacattgtaagaggatagtattgaaaagtaagtctccaaccactcttggtatcaatcccctaattttacttcctagagacaattaacagtatagtttttatgtttgcttctgtaaatatttttgcatatacaaacatacacataaaaatatgcccatttttgcacattgagagtataataggcacaatgttctgttctttgatgctattaccttttacataattaacctggagttttttttttcctgtagcgcaatagactgacagatggtgaatgaaaacttgcactatggagagttatgtcagtgttttaataagacaggaacccagaaataaatgtacgaagtttaacatcagcatctcgtggcctttaagtcaaattggacaaccattcaaagcttcataaatgctaactgcttctcatgacttcagaagcaaacaaaaaaatcattattcaaatgggaaattaagctgatcatcagaagtacagagaggatgtcctttcttaaaggcggcacgtctaagggagtgtctgagacctggcttcttcattcaggatggaggctgctgctactctttaaaagaaatgttcacatccttacttcctgacttccttctataacacagtctgcttcacaacactatgactttatatgtcagagcgggttaggaggagctgaatcttaaaaatttaagaagatgccaaggtctagaaaccactcttaacaggggaaaattagaccctgcttgcttttgggaaaatttgttttccagtcagatgtttgtcaaggttaaagaaattcacgggccctctgttcgaattgggagcaattgggagcccttaagctgaatgagtagacttgaagtcccacttagaatgagcctttatatttttgttctgtggcttgctcagggaagggatacacacttggggagaaaaagacttggattctagttgatgtttttctcctagctgactagggaattcagaacaagttactaagagctttctagtccttagttctctcatttggaaaatgaaaattttaaattagagattctatttctaaggcaccatgtatttcattttcttaataaaaagtatatatattcccctaaagaatactcataagaaaaaggtagagttaaaatttcccaaattatttaattcctggttgcccagtaaccattaaatttctcagcagtcaggcaagaaccacattcccaccttgagacaagatttaggcctttccaaacttaccctcgggctctgttccaagtttatttgtaagtcagttgcatacaatttggaatgaaatgtgttataaatggtggttaggtccctaagtcacagaatcttagttaaccctcagagtgcctgatatactgcaccatgtaaatagaaagcagctgtatgtttctatgggagcaaaaaacttttgtaggaaaaatggtagaaactcgtactgcaggtgttgattattcagcaaacttctctagataaggaggactgggaacttcatcattattggtctagttacattcctggtcactccctcatcccattgactggtcagtttccctccctgtggtccttgtgcaagggtttctgcctcaccccataccctctgctccttgcccggtatcatggttcttctgagggtactactgcccattcacccttgtgctaattaggattacactgggtaaggaaagacatttgttctgtagcggagaagcggggaaggccatcagaggctttgagtgtcagaaagatttggtcttgaatgcaggctctgggatgcaaccgtagggaagttaccaaacatttgtgagcctcattttatctttaacaaagctgataatacagaactcagggccttgtaaggactcgatggtatcaggtacacacgacatttgcccttgagtgctcagcgaatgttagtattccttctgccatcggcctgtcacttccgtttttctctttggctctacagggaatacttgcatacaaaaagagctgaagtaagagtcacctacatcttaggaaaaaagggctgctttaggtttatcctcaagtagttttgtccaggattctgaggagaataaaagctgggtcagatccagtgtgttgaaaagaaagctgaggtgagaagtgagagaaacagagaggcagagaaagggggaatgagccctgtctgctatgaagtaggaggcaatccaaaagacaaggaatccgtggtcattgccactgagaggagaaagaaggcaaactcactcctgtgacttcagggccatccatgaggtgggcagaggaactcagagtctgcccgattcttggattgaatcttcaaattggtaaagctttatatcaagcaactcccaaatgcagcatagttttgaggtgataaagaagagtcttttcaaggctgggcacaatagttcacgcctgtaatctcagcactttgggaggccaaggcaggcagatcacttgaggtcgggagttcgagaccagcctggccagcatggtgaaacctcatctctactaaaaatatgaaaattagctgggcgtggtggtgggcacctgtaataccagctacttgggaggctgaggcacaagcatcacttgaacccaggaggcagaggttgcagtgagccgagatcatgccactgcattccagcctgggcgagagaatgagactccgtctaaaaaaaataaaaataaaataaaaagagtattttcccggagtaccggtaatattggttccagattcaaatgtattgtccagatacacagagggtaaacaggaacgcttcaggcatcctttattaaaagcacctcagtctatgtcagagggccaggcagtccattatctaatgaaaatctcctaccattgatttattttatcataactgcagctgctaagtaattttgtttaaggaatgatttacatattagtgtcttcagcaggatctcatcattagcatctagtctccagaaaagttaacacataacagtgaaaagaaaacattctctatcacatgcttctgcatgcatgggcaatttgagtcataccacctgttcccctcttctgttatgctagagtatacaaaaagcagagatacgcatagtttactatgatcctagatgcttaaatatcttgaattgtgttctatcttggactcattattcatgcataaagactcaacagattctcttcttgcacctctcaaacagcaacatcaacaaaacccaaacaatgtatctttcctaatgaggtgaaagcatgcataccagcctaagacagaaatgttgcaaaaatgttttttgcaagaaggtcagtttgcttttcccatggtaactaaggttaatttctactgtggttcattttggcatccattttattcatgatgattattagagggcatggatattgggggtgtgttgatgttgggcaccagagaaatggaaagaggcagatggaggatgcaaatcattttcactcagaacctaaaatgtttactgttagataaagggtagagaagaatcttaatttgactgtcaaaacatatgattagttgaagttaccaaaactatttttttaaataacatttatcttaagagctataaataaagaggaaattttgcactagagatgaagttatgaacatttcattaactctaaagagttaatgaaaaactagttgattatatgtgttcatttataggttgacacgtgaatttccagagaagtaacttgtatgtttttaaattccaatccttatcttacatctgggcagaatcagacttgtgaacgtcccattccaaacaaatggctaaacactttgcagactttgtctagaagagtgccttacccatataagccctctgttataaaattgttttaaacgttaaattagctgtcaagctgttctgcatcagtggcaccacctggtagcaaggatggagatctctgccacccaagatctctttagtgctcacgtcatttctccaccgcaaggaggattgcgggggtggacgatgctccctatttagtcttctgcattttgttgcttacagttcaattaacatgtcagttagagatgacttttggttgcagttaataaaatatctgaccaattgtatcttaaacacagaggagttgatattttttgtagaacaagaagtctggaggcaggtagttgagagctatggaagagttccgtgatgtcatcagagacctgggccatggtttattctgctgtaccatttttaacgagtgactttggtcctgatggttccaagacgactgctgcttctcaggcaggaagaaagagaaaggacgttcagcctcagagtctctttgtctttccatttgggaagggaaatcctttcttgcagatatcttctcaagcattggccaaaactgtgtccacacagcttcccctggctggatcagggaattgagatcctccagcctttgtagcagagaaagaccaaggagaaagaatttgggaaggggtgttgagtgagccaacatacagttatctgccacaattaaatacagcggattcaccttgcaaataagcattctttttagaccatttattttctttctctctttgtcccaattcctttattccttaggaaagtcttgatatctttgtgaggtgtgtttcaaaaaagaagctccagctcaggttgtaaggagtaagcaaaaataataattccagtgattcagccatagaagtggaaaattatattatttgaagaaaaattagatgtaaaatcaatgtcatcgacagcttaaacctggtaaaagcaaggaagttcctttcagaatctaattttattccaaatacatttattgagcaccatcatttattgccctagatgccaaggataagtgaacacaacatgacctcttcagaagtctgcatttttctcatcttttttccctcaagtataagaatgaaaaataaagctatttctaattagttacatcagtcatttctatcagtattactatagattttatttttattgtatactggatatttaaactaaatttaagcctttgtgggcttagaaattactgtttcatgagtaacatggcttatgtaggaaatttccaatgccattaaccttaaaaatgttcattggaatactgcttatgtcatcttggaaactacctttgcggttgacatataaactgcacgatggtctattttcattatatgtttctgtatgtacataagcatcctcatgataaagattgtctacttgatcaaacttcagccagactcctgaaccttctcctaggcccacctgtgcacttctttgtaaaaatccagctgtagcgagaatcctgctaaatcagtttagcaagaaccaccttcctcttatgtatctgatcaggttcctcatcctccaccatcccccatgtgacgtctgatcaccctggcctgtgtcttcagcaaggttcctgttaagttttttttagctagaatcccccttacccccatgctttctcttagtagttttccatccaccaaaccccaccctgctccttggctatcaattcccacttgtccatgctgtattcagagttgagcccagttctatactgaggtctctttcccactattgcaatattcctgaataaaatctgtttttaccactttaccgtccatctctggtttttctttgacactcacataaccagagttttgtatgtgtgtgttgcttgacacatcacaaatacctgggatacgtgtactgattttttacagggtgaataatctttttgttttccccaatatcttagaaacctgaatctttaacccctgggcttagtacacagttaggcatataataggtgcttaagtaagcgtcaactgatgattttaaatgcagaagtaattgtcacttaatgaaatatagtcaggagactcatggattttggcctgtcttcctacctgttcttgtactgcaacagtaagtgtattaaggcaatatttttggcagcacaatcatttagtttgaatgcattagtaaaaggtggagtccaaagaattaatcgctggaaagttttgggaaaacccagtaacaactgtttccatagagtaatttgagtgacagccaggtaatagctacttattggagggactccacagtcagagccttgacagggacctgaaaaagagtgtaactgaagggtaaatgtaaaagcttttgggagaacaagggagtggtcaggctgaggcaaagatctgaaaagaaatgcctcctggggccaagctggtaatttgaatgactgaaggtgactgggtgggaactggggcaacctgaaaagcttctgttagggtaacagagcctccgttgcagctgactgttctatgagaatgtgagtctctattgtcaggtcttcaggttcttccagagaagcaagacaacgggaaatcaccagatttttaactaatggcgtatcattcaacaatttcaaaaaccattatgtgagcccaaactgaccaacgaatcaaacacacacacacacaaaaaaagagtctgcagactaaattcaaccagttggtgacctctggtctgtggttaccagagaagtaattgaaatggagttttgggagaaagatcatatgttgaaatcttgggagataagggcagagaaataagtaagccgagacggcggtaaggccaaggtagaaaaggtagcctttaggaaaattaagttaagactttttaaaacaggaaggggcaaaagatgaggttaaagcagatgaggaaatttactgttatttattttcatcattaaaatacgctttccacaaatttttcaactgtaagagagagtgataaattcaaaataggtaatgtcaaccatattatgaagagtatgtttttgcaatccaaaaaagctaaggcacaacattaaaaaaaaaaatctgtgaatttggctttgcaaaggtataagaattaagtcacatctgatcatttttagagtcttaccttttataacaaagaggaaaatttaattaaactggctctgccctggcgaatctgggatgtgtgttcacttatgaagagagactgttaagattcgttaattaatgaggttgagaatagagttgaaggagattggggtaaatttataagtttgtgtcattctgagagttctgtaagtagctgagttacccatgttgtgactgagaaaaacaggagagagcagtgactgaaggttctgagccaaaggaggagaatagtattgtttattccagcagccagagtggcctgtgtgactgtaagtcgcctgtcaagagggagactgcaaggaaagtgcattgatttgatttggagtagttgtaactgcagcatgaagaatatgatatatagggatgataattgaggaacaatttaatggctgcataccttgctgaagttgaagttccttctggagataaaggtggcaaaaaagaaagtgcttaggtagaagagctttttaaaatgagttaacagaaaacagcagactaaatatggaattgaggagtaggaaatgaaggaaatgaatttgaagatttactttctttcaggatgcagagctggtatgtaatccctctgtttccagtgccttctcccacttccaaatttcactgctcctcatgcgccctggtgtgtggtgcagcttcgagattaagcctccagccttctgtcaggatgaagcagcaggtggctgagatgctaggctccaagtgggggaggtgtttagggctctaaagactttcaaccagtccttgtattttcagccacatttcagtcttcagaggaacctggagcctttcatttctgagacttcttggctacataaactggcatgcgtcttgttagttcctcccactccctgccccaatctccttgtctccccaacatcattaattgagcttgggatttctctggtctcctaagttggttaccagcaggtcattttctaagccaccaaaatactggagctctgatctgttctcatctcctctcctgttttgttaattttcttttgggtaaatgccattttttattcctcttctatcaacctggtagagtttcagggataaagagagacaaatgagtctgctccatctgctgtgtttaactagaagtcccaacacccaaaatccttcacacgatgtgcagggctctgcagtgggcctccccctgcctacctgtcaggccttatctgtgcccactcttcctccttcctctctgagatttcagcaatattggccttctaaggattcttaaagccccaccttcttctctgcttcagagcttttttttttttttttttttttttttaacatgtgctgacctattacgctgctgtgttcttacctggcacgctcccatcatccttcaagtctttgcttcaatgtcaccttctccaagaagcctctcggacctatgtttccctatgtatacagtctcatcacttcctgtgtgtttccttcaccattttaccacagtacatatgaatatttgtttgttagtttgtttgagacggagttttgctcttgttgcccaggctggagtgcaacggcacaatctcggctcactgcagcctccacctcccaggttcaagcgattctcctgcctcagcctcccaggtagtagctgggattacaggtgcctgccgccgcatccagctaattttttgtatttttagtagagacggggtttcgccatgttggcccaggtggtctcgaacttctgacctcaggtgatctgcctgccttggcctcccaaaggctgggattacaggcgcgagccaccgcacctggcctacatatgaatatttgattattatccatctccttcgctacactgcaaagtcaataaaggcagagatttattttggttaccagtgtattccatgtacttggcatggttcttggcttatagtacatgcacaataaatattgaaaggatagatgaaaggattatggatagatgaatgtcttttaagcagttataaaacagttctgcctaaagagtcttttttaatcagtagtattacttcaaatacatatttaaatacacatatgttataaatatataaaatatgtatttaaatatgtcatttgtactattttaaatgtatttaaaataatatatgttatatattaaaataatactaatgatttttaaaagatcaggcaacactgctttgtagctttttagaagacatttatccttatggatccataattattatggattgtatgttttatatataatgaaggttttgggagttagagccctgatccttccgctcttgaagcttgatttaaaggagcatggcacagtggtgcctatatgagtcagccctccattatctggggcagaattcaggccccagaaatggtacttaagatacacagttctcccccagaaaactttatatcggccatttgttacagaaactgctttctcaacaaaccttttaccagggcagctaacaatgagcaaaactaatttgaatttcaactctgccattattacagtgttgctaagaagtagtgagattctgctgaggaaggccaagcaagaggagggagccagaaatgccttaaacaatccacagccaggattttgtgctatcttttatttcacagttgaacttctcagtattttttggttcataacctttttctcttttcctcaattctgagtcttccacatttgtgccatactaggtactttattgcttctctcccttttttttttttcttgagatggagtctcattctgtcgcccaggctgaagtgcagtggtgcgatctcagctcactacaacctccacctcctgggttcaagcaattatcctgcttcagcctcctgagtagctaggattacaggtgtgcaccaccatgcctggctaatttttttgtgtttttaatagagacggggtttcaccatgttggccaggctgctctcgaactcctgacctcgtgatccgcccgcctcgacctccataagtgctgggattacaggtgtgagccaccacacctggccctctccttcatttcttagaagagttttacaaagtcattggtgataaataagtaataccatttcacatctggaaacataacttgatagtaattataaattcacagactgtactttctgtacttatctaagtatgaatgcataattcctgtttatctgtgtgtaggtttatttttcccccatttaagtaaagctctatgttgatgatgaggtttttacgagttgagattttaagaggcctcaaatatatctaaaaaattatagaccaagtatgatgtgttagtgttcctcttctctcagctaattctttaaagatatgttccagaattcctggtctgttcttgaagatctcccaataattctagacttctgaagcctggatattttggcttaatttgctttcaagacagactggatttaaattactcaatttgtctgaagtctcattaagatccaaggttcttgtctgttctagtgagtttgagctggcaagaataatacttgtcatctgaaaagtccattagaatcctttggaggagtgagactggaaaattggagacatattattatattttaaaatatgccacctttctataataggagtatgtggggagactgccttgttttggcttcttgggaaaatttggaaaattagtaaaataggcaggcagtagtagttcaatgcgtattgtatgccaaacactgaatttagaacaatactcccccaaaagcatatgtgctctaaattttatttttcacttaccacctgggagatttggattaaatttcttctgggaaatagagttggtatgaagaaacaaagaccactataccaatttatctgttggaataatcatttagccgtacagctctttccactcataaagttaatgaggtcattattgttctttctagctaatagataggcatattgaaaccttaggcctttccaaaaagtctccataagccattggaaagatagactaaaacactccttgttttaaattctagacctcagttcagtcagagatagtaggatttttgcagtattattaaaaagacagaaaccagctataaaattgaaatgaagggacttaatgttttttttctgtaatatctttggaatgcttccatggctttaaaatgctgaggtgtttctcactatttttcaaaagcatgtaacatgtagatatgtgacgcaaacttgaccagttgttcctcttttctggtgaattttgacacctgctactattacacagagtaaaagtgaaagtcataaaacagaaatacttaccaaagtcaagaaaaatgcatagactaaacaaaggggcaagagaagcctattacttgtttcatgtttcaaaataaaagatgaatggcctatcacttcagtagttggaaattcaacttgagaaggtaggtggtttgatgtttgcccttgttccttacgtttctagatttctctatttataggctagaaccagccctggataaaataatacaagttatgaagagaaatgtgcagttcagcatttttacccttctgaagtgcgctttctcccagctgccatggaaacatggcgtaactggtttcttggatagtctcactcctcttgagttccggctgtgagagctagtgagctcattacaacttggatcagagtcctggaaagtcagctcccagggaaagtggaggacagtctctcatggggcacgggaatggggggctttagctttattaaactgcatacatactttcactacacagtcatcccaagctttagcccaggacagtgtcacattgttcacagctgtattgcatcttgaggtttctgtgtgcatcctacacactttcctaaggcagagacttatctcttccagctgtaagccggagggagtggtgctgcagactcctagcaacacatgcggactcaaacaacacaggcagttaactctcttgagtagtagacttgtagggcaccagaactccgttgcagttcactgacagttaccagatatacatttgtatggcttccgtagcattgtgatggaagctaaacgtttgccctgctactttcttttttttttttttttatttttttattttttttttattatactttaagttttagggtacatgtgcacattgtgcaggttagttacatatgtatacatgtgccatgctggtgcgctgcacccactaactcgtcatctagcattaggtatatcacccagtgctatcccccccactccccccaccccaccacagtccccagagtgtgatattccccttcctgtgtccatgtgatctcattgttcaattcccacctatgagtgagaatatgcggtgtttggttttttgttcttgcgatagtttactgagaatgatgatttccaatttcatccatgtccctacaaaggacatgaactcatccttttttatggctgcatagtattccatggtgtatatgtgccacattttcttaatccagtctatcattgttggacatttgggttggttccaagtctttgctattgtgaataatgccacaatgtgaaggacctcttcaaggagaactacaaaccactgctcaaggaaataaaagaggatacaaacaaatggaagaacattccatgctcatgggtaggaagaatcaatatcgtgaaaatggtcatactgcccaaggtaatttacagattcaatgccatccccatcaagctaccaatgactttcttcacagaattggaaaaaactactttaaagttcatatggaaccaaaaaagagcccgcattgccaagtcagtcctaagccaaaagaacaaagctggaggcattccctgctactttcttctggtatgcctgaatcactgtttgagaatggattggactttggtgcgtggaaaactggtagcagaaggcttattcactgcagtgggttgggggtaggctgaaaagatgtcagggaggattaactagaggcagaatgtgtcatagttagaagtatttagaagggaagaaagtttgaactctgatactgttccacactaatattcatgccctgaaagaatcagatcattcttgcctctcccacttggatctctagctactggaatttgccaattcttgatatgaacgctaagatttggatggagcttgtgacctcatttagaccatttgttctaaatgctgaatagaaccaggaaaataggaaaagagggtagaattggggtcataagagaggaatcgtcgttctttgaaagaagaaagatgataggaaactaggcacatgagttacgaggcagtggagaaggaggattagaaagggaaaaaaagaagagaaactttatgccaatatcttctacaagatgtttggctggcacaaaactaacactcaatacttttgcataagtaaaggaatgagagaaaatttgggattggatgcttatcccctggaaactgctacaggctggtgttaatgggaaagggatctgtatttgaccaaaagtgcatttccacgtctctacatttctttttataaagagtcaaagggactcaatgatgagtgtgtgtgtaagggaactccacactagcaagtacaggaaaaatttgatggtactggtgaaggatgttgcaccaatctggaggggaggacaggaattggtttctcatggattgatgccgcaagacaattcataccatgagttggctgagaccacttaaaaaagtaagcagtgatgactgggcaaaagagacaaaggaagaaccacatcttttaggggagagagagagaaggacaattaaagggactcaactagatcaagttctgctcactaaaggacagcgtccaggcaaatgttaattatcttcaagaagcaatctgtatatatagcatttcaagatactccgagatgcttttaatttattgaatactttttattggtatttatcataaacaagagactcacaaatatatcccagaggggaggttttggtgtagttgactatagtagttattaaataatctattaataaaagcccacaaaatggaagatagaaagatagaaaaacaaaagacaacacaggatggtgttggtatacagaatttatacttgaagtttaacaacacggaacaagaaactttattaaaatattcatttaaagaacttccatatgaatcaccagaggctcttagtaaaatattgattcggattcacagatctgggtggggcctgagattctgcatttctcataagctccaagcagatactgatgctattcttcctcaaatcacactttgactaacaaggactcacacaggttctctgtaattggtgttggtagtcattcatggttagatgtagttgaggactgccctcttaactacctctcggctgccaggttataaagaaagcaagtctcagtacaagttctgtcacttaggagcatttattagccaatgggtacaaaacaatcttacagcctgtgccagagacacagtgaagtcacagttctgtcttttggggtgcttggtgtgagaggctcacagtctacacaggccacagtcctctattagagtggttctcaaagtgtggtccctggaccagcagcatcagcatcacctggaaacttgctagaaattcagattcccaggcccttcccatacctactgaattagaaaatctggaggtggggcctaggaaatctgcatctttaaactatccactccaggtgattctgatgtttgctcaagtctgaaaaccattgttctagcagcaggattccctcaaccatctaactgaattctggcaactaagaatccggtgaaccacagctggacattttggaattcagcctagggcaccatttctaaagatggagaacctactggattcttcttaaactcaatttaaaggcagggagtgtttctaaatgtttttcaacaatcttcatattttgcaaaccactaatatcactacacaggcccgtctaactattaattaggaaaattaatgaaacccctggtgtaataagagctaaatataactgaatcacttacagtggccgcctgtggcatgaggctttttgattaattgctagccaaccacccttggagttcactcctgattaagacaactgaccacctctacagtgtagcttaagctaacacacacatacatcagagtgtactgttcatgtgagggtttttaaagactcttaaaatttaccttatcagggcataatttaaacactataacatgtttccattttaagtgttcaggttagattttggcaaatgtatacactcgtgtaaccaccatgccaatcaagatataacatttcgatcacctagaaaacacccttgtgttcctttgaggtcagttacctactcccaccacaccccaggctaccatctggcatagtagctaagttttgcctgttctagaagttgatataagtgaaatcaaacagtatgtactgttttgtgcctggcttcttttacccagcttagtgtttttcagatcagttcacattgttgcattatcagtagttagttcctttttattgcactttgcacagtagtatcccactgaatgactttaccacaacttgtttatccattaccttactggttggtttccggtttttgactattatgaataaagctgctatggatattcatgtacacatctttttgtggacatacatttttttttattctgtgcaaatatccaggaaaagaatatttgagtcataatatacatgtgtgtttaatttcataagaaactgcctaactggtttcccaaagttgtcgtacattcccaacaagcagtgtctgagaattccagtcgctccatatcctcaccaacatttggtattccggtcttttaaacaaaattgtatgctgaatagtttaaattacagacattgttttctttcccctagttgaaattcaggcttttatgtttggtctctgcgatggccataaagctgaaaatgttgacccaagtgacttggatatggattgaattattgccctttcctaacacctcatcagaattggtttcgtaggtgtcatttgattatggcagtcatgtatgtcagtgtactttttctttctttcattcttttgtttattgattcagttggtcagtcggtccatgatctgtattaaaacagctttttcagagggcagttgcatattaagttgctaggaaaaatgacagaagtaggtgacagagttcttgtcttcaaggagctttttggagctgagttcctgaaataaatgtagcccagtatctatcaaggcttgtgcagacttgagtaagaacatcatctaaatatagcttcctgctaggtggcgtgagtcagggcttgatagaccggtgactgcagaaaccacagtaacatatattgttgttattctgtgctgaacattagaatgattgtaccttagaatatagagccaaatgtttattttattcctaattatatttttaaatacatatcacacacatagacacatatgttggataaaaaatactcaaaatgttaacagtgcttatttaaaaggtttatataaactttttttgtagagatgggatctcactatgttgcccaagctggtcttaagctcctggcctcaagcagtcctcccaccttggcctctcaaagcgttgggattacaggcatgagccactgaatccagccagttgtgcctatttttgagtttatgggcttgtggatgatttatttgattatatatgtatatgttaaatgtctaagttacccaaagtgagcatgtataacttctacagtcagaaaaaatgttatattgccacttgattgtttaaggtcttatagctatttaaataatgtatttcttgttctctttaatcttgtgcagaaaagattcactacagtagatccagattactttctagaaaaaaataatgcctgtccatctctttcctcttgggaacaggactacatgaatgcccttcaggctataccactttagtcttcacagaacttagccttcctggttgtcaaagggcaaaaggaattattttttcttttccccacgttaacagaattttcacctccgaaagcttggcgtatacacactatatgttttctaggctatttttgtggtggttgtagttattggcaaatcactgggcgtcgggggtgggttgtctgttatttctgatggaataacaaatgctctttgttttccctcttttcagctgacctgaataatgtcagattctcagcttataggactgccatgaaactccgaagactgcagaaggccctttgctgtaagtattggccagtatttgaagatcttgatactatgtctttgcttagaataaaaagtaggttgggtacatttttacttagagaggggagaaacagctgtcacaattcctgttgcaatgtataattcattctttaatgtatccttggcctagagtttgcctagaatgttttgttttatttttagaatcattcctgtcaccattcctcagctactgatgttgaattaagatattgagaatttttattttccaactactggcattggcatcggcatccataattacctttgtgaaacttgcacaatccttgttctacctttgtttttttttctttttacaaaatgtacttagtattagaagactatgactatctgatctaaaccaaacttcatagacatgtgtggtttattagcttgaatgctaacgtgcagatgaatgaagtggtagaggaaaaatgacagaattgctttcctccttttttatcatacatctgtggaaaaatcctgaagtgttacacagctctatcatgtcatcaaatagtttatgtataactctactattgtctgagggtctgtgtgcattgatgatatgcccatgaaacaggcacagtttctttttctttttttctgtttttttttttttttttttttttttgagatggagtcttgctctgttgcccaggctggagtgcagtggagtggcgcaatatgggctcactgcaacctccacctcccaggttcaagtgattctcctgcgtcagcctcccaggtagctgggattacaggcatgccccaccatgcccggctaatttttgttttttgtttgtttgtttgtttgttttgtttttttttgagacagagtctcgctctgtcaccctggctggagtgcagtggcgcgttctaggctcactgcagactccacctcccgggttcacgccattctcctggctcagcctccggagtagctgggactacaggcacccaccaccacgcctggctaattttgtttttgtaattttagtagaggcggggtttcaccgtgttagccaggatggtctcgatctcctgaccttgtgatccgccctcctcggcctcccaaagtgctgggattacaggcatgagccaccacgcccggcctaatttttgtattttttaatagagacggggtttcaccatgttggtcaggctggtctcgaactcctgacctcaggtgattcacccgcctcagcctcccaaagtgctgggattacaggcgtgagccaatgcgcccggcccaacaggcacagtttctgctctgatggaacttacagtctaacaagggataaccaggatgttcatgaaatttgtagacataagcaaatatatgtataatgtattaagaatgtctacagttggttaaaaaaataaagtgatcttgtctctatttccaagaccatttcaatgtcatatatttagttgtgcaacagtgggacaatggggtactatgtgaacagctaactgtgtggaatgagattcaaagaatgtttgtttgaagaggtgatgtctaagctaggtaactctagaagagtaagcagctctctctctaggaagagcgttctagtcagaaagaagagcatgtgctgaagggcccagagaaagcatgacacattcaggaactgaaaatatgtcagtatggctaaagcacagaattccaggggaaagatctattgtgaaataataggctggagagagaagcaggaagcagattgtgcaaggtttttaaaacccaagttaaggaatttagaggtcaggggatttggcctgggggtgacataatcagattgtcgcttagaaagatgattcttgctgtggaacagagtatggattggtgcgatgtgggagtgacaggagaaaaacctgttgcagtaatctaaaccagcaatgtggtggcttgaattagcagagtagtaagggagataagtggagagaatttagaaatatttaggaagtggatttgacaggcctcagtgattcatttgatgtggtgcagggatgtccaatcttttggcttctccgggccacagtggaagaagaattgtcttggaccccacataaaatacactaacgctaacggtagctgatgagctaaaaaaaaaaaaaaaaaaaaaaaaatcgcaaaaaaaaaaaaaaatgttttaggaaagtttacgaattcatttgggcctcattcaaagccatcctgggccacaggttggacaagcttgatgtggtgggtgaaagggagtcaaggaagacacttaggtgcttggcttggaatatcaggtgaatgtgggacttgtctggtaaggttagacacggagctgtggtgctcaggagaaatatacaaacaacgtttagggatcatgagcctgtaggtgctgcttgtaacgggggagaggattggatagctccaggaaagtgtagcgtgagaagggaagttatttaggacacaggataagcaacctacagaagggactgcaaaggaatggccaggaggaaagaaggaaaattccaagaggttatgatgccacatgctccatgggaagaaagaaagaacccgttaccagggtcagatgttgctgggatgtcagcataaagttgcggaaaatgcccattggacttagcaacaggaaggtccctagtaactttggtgagattttagaggcacagtggaagtggtgtggtgagttcaaaagtgaaccaaaagtggagaattagagaaggtatgaatgattcttggagaaatttacttatgaaggggagaagagtggggtggtagctagttggagggggctgaggagttaatggaaatgtatgtacagtcacgtgttgcttaacaatggggatatgttctaagaaatgtgttgttaggcaactttgttgttatgtcaatataggagagtactacacaaacttagatggtatagcctagtacacacctaggctgtatgggatagcctattgctcctaggctatacacctgtacagcacgtgactgttctgaatactgtaggcagttggaacacaatagtaagtattgtgtatcgaaacgtatttaaacatagaaagatacagtaaaaatatataatagtgtaatctcatgggctcgctgtcatataggcagtccattgttgactgaaatgtcattatgtggcacaatatgtgtatataagtgtgtgtgtgtgtgtgtgtgtgtatacattgatccttgaacaacatgggtttgaactgcttgggtcaacttacgtggatttttttcaatcaaatgcaggccaaacatatagtattcgtgggaatgtatttatatgagtatgagaagacagggtgagattacaattattggcccaagaggagatgataaataatgggtgttctcagagaatacgggcaggtaatccagagcccaagggagggaagagatacctctcttccactgtaatgggtggggtagagggaaggatctgggcaggtccaggtaactaagaaaccaggtagcagcaaggtgaaggatgtcttactataaaggcttccattttttgtatggagtggagagtccctgcaacgcagttaacagcaggagatgatgaagttgggcttatctttgtggagaataagagagagggcggagttgaaaaccagctgtgtgaacccagaggcggctgagtgtttcacggtagctccaatctgcaggggtgtggtatttccccaggcacgcttagcacttgggagccagatgcttctgtcctggggtagggagggaacagctgggcaagagaagtgaggatttgggcaaaagattgattaaaatgatactgacaagtccctgttgggtaggagaagctgtgaacgcatatggaaactggtaattaggaggtagagggatgaaaatgctaactcttcagggaggtaggggaagaagtagtaaaggaactgaaggtcaagaagttgtggtcagagagaatcatagatgaacattattttgaaggtggaacagtttcaggtgattagatctaggatatagccatttgagtaggtggcagaggtagagtggatgtgaatttccatggaggtgaaatagcaagttaaggaactgagaggctagaatgatgcatgagtcccccatgccaatgttgaaatcatgcagaattggagcgagaactgggcaaaagagaaggaccgtgaaccctggctgccaggtcttcagaaataaaggggttcaaccagaggatctgcagaggctagcaataagatagtcaaggagtcacttggcatatggttcttacacagagatagagaagaaatgccttagaagtggaattatttggaaagagagactaggccttttcccttcatcttggtatccccaatgcttagtacaaaacctggcacacagcatggttcaatatgttttcatgagatgaatgcatgaatgaaagtaaaccaaggcttccatttccttatagcccgaagttatcatttttcagctatatagttgccaagtttaactggtgtttaaagggctttccaggtcgagggtttccttaggacctgttaatacgtcatagctgggaaaaagtagtttgggatgggatcgagtcagggggctgaatagagaaagttttcttgcctctttttcttcacctgcccctgcccctgcccctgccccatcccagagctactgctttcctttaataaaggagtaattaggcactggttatcatgaagtgctagagaatattcctgtgagatcctaaaagttcagaagctaaccatttgttccagtttatactatggaaaaaaaaaaaaaagaaacccagaaatagaccagatggaaaaaccttataatgactgttcctttctataatgtccattttcaccctggatttaggcattattcgattttcctgctcaaaaaaaattccattcacatatgtgttttattgtctgtcatttcaacttataatttccaataaactttgggaaaatgggggaatttcataatatacaaaattttgtccatttgaggtgataaccttgtaataaaggtaagctccgaatgtagaataatttctttaaattttcacttttaaatcaatttgaaattctctgcatttcctttctgagcatggcttttctaatatgtgaaaaagattcaagtatgccaaaattaaggtgtatgtatctaaattaagtattgaattctcattaatgctaggagggtgccatatatagtaaaactatagaatgaagagttcaccccatccttttattgaacatatgtgtggtcacattacttactttcaatatatgatttaagaattttctcctaattttatatttgcttagatttagcttccaggcttttgtcatttctaagcctgcaaagccatgataaagagctattgtctgcggtacaggcaaataaaacttgccctggctagctttccctaccaaaggccacttctaccaactctaactttaaggaaaattaatgatgttatctcagtgatttcctggtgccagtgaagagtttgaattacagatgccttggaaatatgcacttccacctctattaagcacttgatcttatttttttttcacttccctatcaatgtttccgtattgcagaaagccaaataacccaattgtatccactatagagaattcactatttaagtggagagcatcaccgttggcctataatgtccccagtttgtaatcagttaagtgttgcatgactccttactgcctctcaacacattggaaatgaaaatgaaacttggtagaaaagcaggaacaaagataaaatcttggtaagaaggatttataaactgtttcatatagctgatactccattgaaagttatgaagaaggtaatttaagcattttctttctccctttgtagttctgatgacattctacaggtgtgaggcttctaaaattaaaaagccaacttgtaagagcagaaataaaaacgcacttaacaaagcaagtgtatttagtttattaataatgtgtggtgggttggagagagcccaaaccatagggctaaatatactgcagttgataagtgtgacaaatattctgcaaacagtaagaaatagagaacattttgcctctattcagcaactaaagcacacattatagagatttggtacaggctggagttgtgtgaatagtcacagtttctggactcgccctcaccatgacaaaccaggtgaaaaatgcaccgccttctctgtaaatgcacctcaccttttgatggtgcgctaagggtgacattagataggcttcagttgctaaagaagactctcaggacccacaataacatggcttacaaatccgcgctctattgccagaaaaggctacattacaagagcattactgtcaggatatggatccacagccacaggctgcctccacagcaagggggtctcgagaggccagtgtaattattttgccactgtcctacaaaaatctactttttctatataccatgtattatttttcacataggttagaggccatgtctctgttagttctgagtttaagacgtcttgaggacatggccaaactaattttctcagtttatatggtttgacagatattagtgcccaagagaggtctcataacatgacccatctatctcccaggggaaatactgtaatcttgtttagctgttacccactagggaaagaatggttttctctcagtcagatgctaaagagattaaagaacacctcgtaggttccgttttctagtaattattggttccattctccagctatcaaccttggcagcttgccatccctatccttcctcctggaattggatgcccttgaagtgcgcttcttgcactaggaagtctttctcgtcagtttatcatttctcattcaaagcaaattctacctggccaggtatctctagcccagttcctaattctcctaatagaagtttcttttatttcaagtggattcatgccccttggcccaccagacatgttgccattgagaaatagcagctttaatgggaaatacacatgagacacaaaaatgtgactaggctaaaatcatatgaatagtagtcactcctaaaaggactttggtttgggtatgtcacagaaatttctgtagccatccatatccaatttctagcttttcagtctcaggaaagtaggcccaccaaattcaacttaaatatctgtcactgattcaagctgtcccaattgtccctccacccactaatggctttccacacggagtaatggggcaaatagctatttttttaaacacataatgttatgacagatgaaacatacagcacgtaagccttctatcacatgcccaatacctttgttaaaccttcatcatcacaattgatggccacacagtgtttattgagattgttataaatcattgttcttcagatttgactgggtaaatattccctcaggttatttcctgacacagctgattaataacagatatgtcctgtgaaagaagaaccaaaagacattaacgaatactaaccaaaagccacattaatattgctccatggtgttgtagtcgcagttagaacgcccatctcgtcatccagtgtgttggataggttggctgactctcccactcacatcttggctctttcaaggaggaggaggttttagcagagtcccccaccccaagaggcatctgagtctaagccaagggagcatattattctcttattttaaacctctccgtaggcagcaacattatattaggttttccctttaaaaaaaaaaaaaagtatcggctgggctcggtggctcacgcctgtaatcccagcacttcgggaggccgaggcaggcagatcacgaggtcaggagttcgaggccatcctggctaacacggtgaaaccccatctctactaaaaatacaaaaaattagccaggcgtgatggcgagcgactgtagtcccagctactcgggagtctgaggcaggagaatggcgtgaacctgggaggcggagcttgcagcgagccgagatcgcgccactgtcctccagcctgggtgacagagcaagactcggtctcaaaaaaaaaaaaaaaaaaaaaagaaaaaagaaataaaaaagtatctttggtggtttccttccccttgcaacaatctcacctttttccttttatcattaattttaagccaaacctcttccccagctacacacacacaccacacaatgcagacagtccccaacttgtgaagtttcaacttaacaattttttgatttcacagtgatgcaaagtgatatgcattcaatagaaactctacttctagatttgaattttgatcttttccaaggctagtaatatgcggtatgatactctctccccttgctgggcagcagcactgaacctcagctcccagtcagccacaagatcatgaggctaaacaactgacactttactgtgtaaggtgttgctagacagttttgcccaactgtaggccgatgtaagtgttgggagcacattgaaggtaggctaggctaagctgtgagtttcagttagttaggtgtattaaatgcatttgtgacttaagatattttcaacctatgatggggttgtgtgatagcttcaattaggcaaggcacaaggaaggagtaatccattccattgatccttgtggaatgcttgtgcttaagtaccaactaatagccatagtatcttattttggaatattaccagcctttgaaactcttaattgtagccccagttcagggactactaggtctggcatcaaaaaagaaacctgtagtgacatagggaatacctgtaagtgccccacttgaattatctttttaattgtaactggtctcacaggtgtagcccatttctcaaaaatgatagttgcttcagctttttggttgggactccacctgcaggccagagagggtgaagcccagtggaaagaaattctgaacttaacattagcttttggatttttttttagcagccttgccatcagtttgcaattgcctcctaatccattttgttagctccttaggttcaagttctctcacttccagattccactagaaagttacaccatcagtaaccaatttcaaagcctgtgttacttttcaaccaagcgtagcttgttgagcaacttcaaaggttctttttcatcccttttatcagaatcttctttttttctttctaaataatgcctcagtcatacttttagctaagaatgagttggaggtgttctaaacaatcttgcttctgacactcactgccctgacagtggaagttaaacagggttcaattgctaaagaggactcacaggaaccaaatgacagtgcttacgaatctagagttccttgcagaaaaaggatgcaatatacccacaacattaaaacaagaataagtgtcacagccacagcctgcctcacagcatagggtccagagaggacaggtgcaagctataattgccctctgtctgcaagagccacaccacgatgcattttctctcttggaacaagagctactgatgtgagcacagaacaccttggaaaccagggagcacaaattggagtttcagccagggtttcttatatcccgtgggtaacctaggcatactgttcctatgtaaccagcctcaaactcagtggcttccgttggtctgactgtgcccgggtaaaaatggtcaatgttactgttagcaataaacaatggtgataacctgcaacccatggctacacttcaacacagtaagtcactttgaaaagcaagtgctttgaccagggctctgcactgtgtagatattttagcaagtcatctcgtgccaactccagcctctctggaattaacccttactgcacagacaactacatcaaagtgcattgactttcttgaagtgcaaagatttgcttgggaggtccctcagccataagtgtaagttgcctgtagagtggcatgcctgggcaagaaaaatcagcaaacatacagcagttcttccaccattactcacctctttctgtttctgtgctaattagatcacagaattatttatacatcaacatagaatatacagattgacctataggatgaacttggggttatatgggcaccatgagactttttttttctccactaaccaactttttggtgcttctgttttatcctactgttgtcattagcatggaatgcagaatggttttcctgttctgtaaagtcagtaaggacaccttctgccacccacttttcccccttacaatatgtacctccatgagaaatcagaaaacctagatatcctgccataacacccagagtgagtctccatatctctggtctcagttgtctcaactgcaaaatgattttaaagcaaccttctggctctaagagtctatcactctgtaaaagacaaaaaaaatctgtcttacataggaaggaatagcaagagttagctactgtggcatacatagaaaggaaaagaatgagcttttgaagctagaaggttgagaagatgattaggcacaaccagagcctcaggaaccattagtgggatccctgtgttgaagtcctgcctgctcgccgccccccaaccgccactgtctgcttttcctgcacagcaaagaggatcctggagagtcagccatttcttttatcctgtccccaccctctctcacccccacagccctcatgcatagggtaccaccacatggtccctgttcttcaatggcttcaaagcctatagcatcctctactgtaaacataatttagaaagtgaagatgtattagaatacttgggtttttatgtagctttaaagatatatctactagtgaatacacacaaacacacacacacacacacacacatacacacacacatatatatatatatatatataatatatttaatggaaattcctagcttaaggaaacaatggtttcacacaactgtatctgctggttgcttattgagggtcctagaaagagctaatcattacatttaatgtttcatcaaaaagtctaggtgtgttctctaagatgctcattttgaaaagcatatgcatggcaattaaattgtccctattgatattctcacctccttttcgggtccatagcatggattgtgtatacctaaatggaaattttttcaaaatagctccatgaaagttgaattctgtttgacatgtttgtttagggaaatgtgctcttcagtcttctgtgatggattgttcttgtgtttaaccacatccagttttagcagagcacactgcacagtatttctctcctaactgtgtcatcttctgctcctgtaatttcagagcaattgctttgctcccctctggagctatttctactcaacatttgctgttctatgtgttacccattcacctgtacagagataagagcaggccccataaaatgaaatgcatgcagtttttctctgttcatttccatcacacggctaaataagactcttaatacaaaagtgattcgaaaaattttcactagttacttcttaaatgcctggatcagaggcaaaatatttatgatgactaaagcagagtaacaaaaaagaaaataattgaaaaacttcaaaccacccatagcttccttcagtatataaggaaacatgttgggaatattggtgtttggaagaaatccattcctctcttccagtaatggagctggcataccgtgtttctaagtgttcctactacgtgcacttgagtatgtgccctctgaggaaaacaagcacacagaagagagagagaagaaaagtttgagtcttttgtctctggacctcgctccagcctcccacgcagtcttctttcagccattccctcctcacgtcctcccgtcctcctgcctccttgcattgctttttaaaattctttattatttttctcacttgattcttcagataagtctcccaagttatcttccttcctcccactttaaagaaagtctcagcttccatgaaaagggtcatttctctatctttagagtatttcagagcaaaaacagaggggccttcccttccaagggaggagtgcagactcctgcttccaccaccatgtctgtttcatgcttctggggaaactccaggattttctgttttcctttttttaaaagagaaaaatgtgtgcgcaatataggtggaaaagtatttttgcacaaacctacataggtattaaccactatttttgtttttttcttaatatttaattagaactggccatgaataacttgtaaaatatactaaagccttaagtttgcatttctttattactgggaaaggtgtttactgagcgggatttacctctatttatgtgaactacatttataattgaattgccccttccccctagatgcatgagagatttacttaattagcattgattccttgcctcaaaggactgagaattccaaccagagcttaggtgtataaggtagtataaaagcaatgttgttgtgtttctagtttggctaataaattggctttagagaaatgcatcttttcatgacacttgggaataaagcttgtgatttgctgatgttggacaaggttgaagtttcacttttgttaaatttttgtccccagcataagattaaacacctcctcagatcaagggaattttcctccctcagccttataaagttgttagaggacttagaaagaatattatgaaatacaatttgaaggtgaaaggagaaataagcgagcctcaggtctgaaaactggatagattatgcaattactttagtttgcctatagaaaattttagtggagagtatttttttcacctaatattagggtagcagagagatgctgaggtgactgatatttcaaggagaaaagcgcttaatgattataaatgcatagctagaaatagagtttacacaaccttagccatacagattaatctaacagatcttctctaatgctaatacaagaaagtatcatcggatctctttaaaaatttctgctaaaacattttttttttcttattcaggtgacaattgactctgtttatgtagaacaggctaggtccccttaactctcagatattccccagtaatccaaggatgggaattatatctttgcccatatcttcacccaatgccagtgagatttaagaacaacttcagatcctgaatactgatcaaactcatcaacttagagtcgaggcataaaaataaaacacctttcaaagagagtgtggttcacgtttggtgtttattaaagggtatgagagagtcctagctaggattctcagaggaaaaaggacactgaaaggaaggttttactctttgagtcatttgtgattttatttgttttttgcagtggatctcttgagcctgtcagctgcatgtgatgccttggaccagcacaacctcaagcaaaatgaccagcccatggatatcctgcagattattaattgtttgaccactatttatgaccgcctggagcaagagcacaacaatttggtcaacgtccctctctgcgtggatatgtgtctgaactggctgctgaatgtttatgatacgtacgtatggcatgtttttatttcccgggctctgtcacaggaggcttagcgtacagaatggtgaagtgtaattagcattacaacagggccctggaagctgtggacctaatgctcttcctgtgataaatcatttttgcatttatgacttgaaaaatattttgataagctaggagttaagagccagaatgtagattgctctcagattagaaaacaaacaaaaccctgagacactcattttgcaaatagtggaatgagtcgacatatagcctttggttctttccctttctcgcccatggattttggaattcttccatgcacttcaggggtggcttcctctcactggcggccatggctgtgctcctggagatactggcacacctgtctccagatcagaatggtcttagctgatacttaggacacttttgcagaagattatgaattgataggccaaacaaaatgaaaacaagcccttaatacagcaaacttagcttctcaaactgagaacatttttcgttttcttttgttttttaataagattttatgaagtttcagtttggcgcctccattcatcactctctcttagagaacaattgtttgttttggattgcacacaagggagatatccccagttctgatttttttttttcttgagcttaatgaagacaattgaagaagggagcagaaggaattggtcttaattttgcctaaattcttcttagatctcaaaattattacatgcctcatttcaccaatcaagaacatactcccatttggaaatctgggaaggttttctgaaaagagttgcaaaacaactgttttgccttttacctttgttgtagacttctactaccttttgaactaaaatttatacctttttttctttcttattttgataaggtattgctttttaaaatttcaggaccacctgactattacattcatcatagtcatctaccaagtccttgaacatgtcggatttcaattgtgaactacgttcacattagttttgataagagtttgtattcaggtttcccctcaaatatattttggcactgttttctttgcagatgacatgtgaatgcattctgaatgtataacttccttctacctgactgaaaagtatttggtgacaattttaactccttgaagacctgagttgctgtataaagtggatttgttaaattttgatctaccttttcttaagagggagaaagataagaaaattttccagtgataggaatttgtttagtccattagtgcccaggatttctttttgactgagggatttaataaattttagtagctggaagttgagcatattgttcaccgaaaataaccgccattgggacctatcctttgtgattttgaagtgctaataggcgaattattctgaaatattttctcctttttctttttaccaatatctaagggccagtagctttccgtaataaaataagaagccaaaaaactattgaaagacactttttaactttaattttaggtttcggggtattatgtgaaggtctgttacataggtaaactcacgtcacgggggtttgttgtacagattatttcatcactcaggtattaacccatttatgcctagtgttccattattggaacactaagcttgtgggaattattcctatcctactgctcaaggtcatcgccaaggtctgattttcacaaaaagtaatatgcagcctccagcataaatgggttaagcgcagtacccaacagttgtcttttctgctcctctccctccttccaccctccaccctcaagaccccagtatctgttgttcccttgtgttcgtgagctctcatcatttagcttccacttagaagtgagaacatgcagtatttacttttctgtttctgcattagtttgctaaggataatagtctccagctaatccgtgttcaaaagacatgatctcattcttttttatagctgcatggtattccatagtgtatatgtaccatatttctcattgatgggcattcatattgattccatgtcttgaaagacattttctacaaaatggaaaacttttcattcttatttttcctttttttcccccatggataaaattagcttattaataaatttgttatgtgaaatgctttatttcagttttctatatgcaaatatagaaaatgctatgcaaataaaagcaatctatattaaaacactgatatagcaacaggttatttataaatttattttttagatcatatatttgaatgttgtttaatagagtatgatatttttcttacggagataaacatttatattctatattatgtgttatgtggcctgaagtaattaattttctttcaataaggggcaatctgatgaagatctgagcatttaagagggctgagcagttagttgctggtaatttttttggcttccatgaccaaagtaggtaatttgctttagtaaccaaagtagattggtgaagattagtaattcttctgcttaccaacttaaaccaaggtggctttccataggtgaatagaatttttttttcttaatttatgtagaacttttgcagttcaaataagggtttttaggaattgaaacttggtaaacattcagtggtcaagttggttgaatttccattgcattgtaggtcatcagtcaaagagataatgaatttggaaaagttcaaaacaatcttaataaaacagtggtcaatagagttcacacatcattgagcactttactcctttatttttccttttcaaggctttattcttaactagaagtgtttaccctctaggaaagggtcagtaattgttttctgctttgattcttcataataggggacgaacagggaggatccgtgtcctgtcttttaaaactggcatcatttccctgtgtaaagcacatttggaagacaagtacagatgtaagtcgtgtatattaatgctgtattcttttattaatgttggctaattaccctagttctagatgggaaatgacagactgttcttatttgacagcagattcctcatgtaagatgtagaactgcttttagagtgtcataaaatttggtttgtgccattccttgtcaaacattaaattgcaggcatttaagtagagaatgaggattagcttttccagtccaggtattattttacattacattgactgtgtctgaataaaacacatgttcctaggggataaagtctgattttctaacctctttctgtaagtcggaaaaataagtgtgaagatttaatctctgcacttgtctagtctttgggttcttatttaaagaataccatgtgacattcatgttcaagaaacattgtttattttataatcatcttactgcaagttgtactgacacatccaattccgtgacgtgactaacattttattatttgagagacagatagcttgctgtttcttaaaggatagatacgtaccaccctacagaatttccttttgattacgcattgggttcttctgcttaaaaactgtaaaaccaaattaaaagccaatgctagaggagtgatggttcagatgaccaagtgaccatccattcatattgtgaaaggctgcagttggttttccccttgaaatgcttataagcaatcttttcagtaggaatattaaacaaattcagcctagcttgtcttttctctcttcccctgaggcctagccacacatgtgaggagatgtgctaagcttcaggacaggcaggagataaaagccactctgtctcctactgatcatttctccttcaggagtaagccacaaaatacacaaaccattttggccctcacttttatgtagtttccacttgagttttctcatcctcagaacgagagaaaaataactgaacagcttttgttaaccattttaaaatgtatttcggatgagatgggatacctgtgtgcttttctcctttaaatattgtagttacttagtataggttaggttctaatctaccgtatatatggtatagtgacagcacattgtaaatataatattaaattgaataattgaggaagctttgagttggtgtttcgaataactactaagagggaacatgtttttaggttggtgaaacaaaaatattaaatgcaaaatgagatgtttgaaagtaactcataactttgaaaataaacacctaggtatgtatatcggagagcagataaaaagctgtgcgtacaatctcaatttttagtgccatcttaggtatcctgttaaaacatttaatttcctagagtttaaagtgtgcttatgggtacagaaagctttcttggatttactttttttgaggggcaacttctaggtgaatataaggtatgattaaaattttatatctgagaacaaaacataacattgcaagcattcagtatgttcattcattctgttacatatattgggcacctactatccaccgggtactgccattctactgtagatacttctggcacacaactgaccaagatatggttccttccctcaaggggatataagtctcctgccaaaaacgatagacacatattgaatcaatgccagcataacatgatgtgagctattaattagaaatacgcagccaggcgcagtagctcacacctgtaatcccagcacttagggaggccgaggtaggaggatcacttgaggtcaggagttcaagaccagcctggccatcatggtgaaacacgtctccagtaaaaatacaaaaattagctgggtgtgatggcatgtgcctgtaatcgcagctactcaggcggctgaggcaggagaatggcttgaacccgggaggcagaggttgcggtgagcagagatcgcaccactgcactgcagcctgggcgacagagcaagactccgtctcaaaaaacaacaacaacaacaacaaactatgcacagtatcctgtgggaacacatacatgatggactagaagctcagtgatcttatgactccataaagaagtcccaactgtggtacatttttgaatctctggtgtccaaggagggtggtgctttgggccagttatatgtctcttaatgctaaaacacttattttttgatgtagttacatcctatatacaataattcccaaggattatgttctggcttagaagaaatttaagtgtcgagggtacgtgtaagcttgcgcttcttgcagtgacacagtttatgtaaaagttatcacacttcatatatatacagtgatcattaacttgattcataaaaataataaatatccagattagcacaaattagaagtaaccccactctgtggaaatactggctactcttgagaattgctactggaattgagttggatgtcaggttctgctggcatccatgggtgctgtgttttgactgttgcaattttcttcttcctttgtagaccttttcaagcaagtggcaagttcaacaggattttgtgaccagcgcaggctgggcctccttctgcatgattctatccaaattccaagacagttgggtgaagttgcatcctttgggggcagtaacattgagccaagtgtccggagctgcttccaatttgtaagttattcaccttctaggtaacatatttattctttcatattttagaaattaattaaaaaacccacagagcttcgttttctcatattagctcttcagtaggcagtaggtatgggatttgggatatttggaacctctgtaagtaagcagcttctggaactctaggttttgggaaagaagacagtgctgaggaaggaaaagaaatctccatctgcagcagggaccccacagttattgaggtgctagaggggaagaagttcagcaagggaggaaataagtctctagccacagaaatcctatgtatataagaaaatggcctttgtaggcgagtctcttagtctctgagtcctttctctaattctatcattatagcctcctttcaatggctgttggtaaattgttagcacagctgtccttttttttaaaactgtcctttgtagctttgacattcccctattattccaaagtctagaggtgtatactctctgctaatgtccatcactgactgaacacactcttgtccgttctctttcctatcctgtcccattgctttttctctgtcgtagtcagtgccccagaaacaccctcttcttcccaaatgcctgagcactccactggtagacattcatcttgttctaatttttttttctctttccttttttttttttttttcttttttgagttgcagtctcgctctgtcacccaggctggagtgcagtggtgagatctctgctcactgcaacctccacctcccgggttcaagtgattctgctacctcagcctcccgagtagctgggattacaggcgcccaccgccaccccaagctaatttttgtatttttagtagagacagggtttcaccaggttggccaggctggtctcaaactcctgacctcaggtgatccacctgcctcgaactcccaaagtgctcggattacaggcgtaagccaccgtgcctggcctctaatttttattaggtagatagtgctacaatgaacatccttatcgtttagcttttgtctttgaagctttctttataggatcaattctcaggcgtgtgattgccagacaaaataatataaacattttttgtggcctttcttcaaaagttgttctaattgtaacgctatcagtattgaaggagtaagatgctttcggtatcacattattcacagtgttcttatgtttttgtttttggttttttcaagtgctaagagctgtttttcttatgtagggtttctcaatccattctaattctattaacaatggctgagatttacaaaatggaactagctgtagaactaactgggttatatctgaagtctttgaccacagactaggatgaaactatagaaggtttcctgggcagatcactgtgaatatttaggtgtttaaagcagtttgagtatttatttaatagttagttggatagatttaccggatgcacacataataagttcatttatgtaaagtgggatatactgtttgaattattttgccaaaattatggcaaattagttgtaaatgtaaaatgcatgtggagaaataaatatcttttcctcctcatacccaaaccttccaaaatgcagatagatgatcaatccaatcaatcatcaaaatgtagacacaagtaacttccatacaatgaatattaatggccacaggcaatctaggttcattttgattttttaaaatccaattataaaacaacttgccataaacgcgagttatttcctaatcttttggttgtgtgttttttttgttttgttttgttttgagatggagtctccctctgtcgcccaggctggagtgcaatggcgcgatctcggctcactgcaacctccgcctccctggttcaagcaattgtcatgcctcagcctcccgagtagctgggattacagggtgcctgccaccatgcctggctaattttttgtggagacagggtttcaccatgttggccaggctgagctcaaactcctgatctcaagcaatccacctgcctcggcctcccaaagtgctgggattacaggtcctaatcatttttcccctttagtcaagtctcagttactctttgagttctagtgaaacacacacacgtgttcatatatagggatatataaacatatgtgtgtgcattgtgacttgggttaaaggtaaggctcagtgatggtccctgctgcaaagtaaactaggctgtattcagggccagctggattctttgttttctcgcccgagtactgactcatcaggaagccaccaccatcctcactgcagcctctggccctcttggatttggttgtcaggataagcggtggccatacagaagctctgctttccctgggctgccccccttatcaggagaccaacctattccatttctgcctgctacatccttttgctggataacctcctactcccctaagcccatgtctctggtttggttacatttctgtctctgtaataacaactctgtattctcagtctcaaagctttgaattcagtccatccttgcatatttgttgaatgcctcctggttggccagccagtctccaagctctttgaaatgtgaaatgtgttttgttttgttttcagaaggggtctaacttcgtcacccaggctggagtgcagtggcacgatcacagctcattgcagcctcgacctctgggctcaagtgatcctcccacctcagcctcctgagtagctgggactacaggcatggaccgccacgcctggcatttttttggtgtatgtgtgtgtgtgtgcgtgtgtgtgtgtgtgtgtgtgtgtgtgtgtgtgtgtgtgtacagggtctctcgccatgttgcctaggctggtctcgagctcttgggctcaagctgtccacccacctcagcctcccaaaatgttgggagtacaggcgtgagccacggcatccagccttgaaatgttttctatgagactggggggaaatcagtcaagatatgaatggtggtaacaggtggcttttgattttctctgtactatttttattttctgagttttcttctttgaacatttataattagaaaaaaaattagtaaagtgctgcctctttttttagggaaagaaacatgttttgtttgattgctttccattgccattcttacattgtttccaggccttctcatcattgcactggcttcctagcaagcctccacttcacactccagtccttttcattggtcttattgccctcatactagttttagagaaaagcatttcccatatgatgccgtccttgaaaatgtcagtatctttctgttgtctagtgaacaaatcctaattcctctatttaactctcagacctttcctactctggtttcataaccacccatagtttgctttcactatcatgaaacagcttctccttaccatttgtacctattatgcttataaataatattgttaccattgctactaacaaaactttgttcacatgaattctctcatttaatcctcaccaagtctttgaggggaacagaatagtcaggctttggagattttgcttttattattgtttaagtggatgaataatttatttgcgcccttaaagtccctcagctggtggaagggtttgattcctagtccagtatgcccaccgccacatttactacctcattcccaaatatgtagtttctgatacttctgctctccagcttcccaaggccaaacaacagctacttttcctgagtcctggatagaataagaaaaggtataacaagacaggggacccttgagggggaagaggaattagtttgaagtgctggcaaatgtagtatttctaatcagatgctagtaaattccatatgtatggcgaggctttcattacttagatttggggagcctctcagcgttttagcaatttgcaatcaggttgaatggatccattgtaaatacttaggaatacttaggaatccacgtcctggccctggcatgcttttcctcggccaggtgcactggcggtcaccttgcctttcattgtgccacgtgcataaaaatacaatgtttgctgtagggaaagataacaggagtgaaaatgtcctctgccctttgtttgaagtataggaccttcagaatgaggctgggctggttccttcagcaagcttgtgctcaaaggctgctatttctaccagcctgaggtaaacggtaataaagtacttgtttatcctacaagtgcattccttgcattgcagatttgatttcctttgatttcttgtcaccacctggaaaccttactttgtttcaggttggtacagttagaaaggtactgaatcttctgattcagacaagggcccagtagtggcaagaagagaggtacgtgtttgtgtgccacactctctggattatctattaaaggttttctcatatccctccccactaaccacttagaaaaggaaatcacctatcaggtctaaatgtaaaattttgcttatttaaaaatcactataggtcttccaaggaattatccattaagccaggaaatgaagtcacatccatggatatgaaaaaggaatagtcactgtaaatttatggctttgacagtggtatcttcgtagatactaaatgaggcaacaggatatgtttccacattaatagcatattgcagtcaacacatttactgggaaattgactcattttggtagtgatagaagtaaagttttgcaacgagtttaagagatacagctgtaattaatatattgccagcttgttcctttctcatattccatggaaacagccctgttgagagattagattgatttttacgaccttagtaaggccaagcctgccctggcagtgagtcacatagactgcctgaaggaaccttgaggattttctgcacctctcctttttcagatgagaaaacaggcccacagtggcacaatgaatctagtctacatcgtgcaatttacatcatgttatggcttcaaccagttcggagactagattgaaatgacagagtgttaatgtgtcaatgtgatcccctatatgaattttagattgtaatagaatgagatagataaataaacacccctcccccaaaacacatacatgcacacacacccatctttattgaaaatactctaatcccaacatagctgtttagtctatcttcagataaaaccaagtatcacttttaggtgggaaaactatacagtcatgtgctgaagaatgacgttttggtcaatgacaggccatatatactatggtggtcccataagatcaacgtaagaagagattataatggaactgaaaaattcgcattactttgtgacactgtagccattgtaacatcatagcacgaagaattatttcacaaacctgcactgccagtcatttaacaggtaaaaaagtatgttttaaaatatttttaattattatggacacataatagtactcatttatgggttacatgtgatattttgatacaagcatacaatgtgtagggtaacacaatcagagtaattggggtgtccatcatctcaaacattcatcatttctctggtaggaacattcccatttcactcttttagttattttgaaatatacaataaattattgttgccatgcatggtagcacgcacctgtaggaccagcgtttcaggaggctgaggtgggaggatcacttgcgcccaggaattcaaggctgtaatgcacaacaattgcacctgtgaatagtcactacactccaacatggacagcatagtgagaccctatctgtaaaaagatttaaaaatatattgattactatagtggccttattgtgctaccaaacactagatcatatttcttcttactgtatttttgtacccattaaccatcccttttttatcccccgatcttcactacatttcccagactctggtagtcatgattttactctatctccatgagttcaatttttttttttttttttttttttagctcccacacatgagtgagaacatgggatacttgtctttctgtgtgtggctgatctcaacataacgtcttccggttccgtacatgttgctgcaaataatgggatttcattttttatggctgaataatattccattatgtgtttatagtacattttctttatgcattcatccactgatgggcgcttaggttgattctatatcttggctattgtgaacaatgctgcagtcaacatgggagtgcagatatctttttgtggtttcgattttgtagtatcttcttcagtaaacattttaaggactttattgtttagataacgtcaagtataccaactttatattcaatatgcttcacctatgagagctggagtgtcaaaatctgtttattttacatctgttttctgcctcctgttgtacttagtattccaaatgagtaagttgcttttccatctatcttctgaatttctctatttgtatgacaaaaatgaataccatctatgcacagttgttgtaataatgtagaatgatatgaaaatgagaataaattacagtctcaactgttgagaacaagtatttctctgtgttagaaacattcccaattctactcttttagttattttgaaatatacaatgtattattgttgccatgcatggtggcatgcccctgtagtcccagctactcaggagactgaggtgggaggatcagtaacacataaatgagaaagcattccagaatatctggagaagtgactggcagagtggttaagtgcataggctttgaaaccgaactgtgcctgagtccaaatctgagctctgctatttgctggctgtgtgactgtggacacatttcttaaccttcctggcccctgaactcctggaggtgattgtgaggattaaatgaaccaatagaagcaaagcacttaagagctgtagtggatacatagaaggtgcccagtgaatgttagctatgattatctaaagtgtgttgtggcatgaaaatatcctgccaatgttaacagttgcttttatctataacaaaacatcatctgtggattgcattttagagattctggagattctgtttctctgcaaatgttaaaatgccatatcaggagacttttggctggttagacagcattccccgggtcaactgattacttttttttttttttttttttttttttttttttttttttttttttttttgagacagagtctcgctctgttgccaggctggagtccagtggtgccatctcggcacactgcaacctccacctcccaggttcaagtgattctcctgcctcagcctcccaagtagctgggactacaggcacgtgccaccacgcccagctaatttttgtatttttaatagagaaggtttcaccatgttggccaggatggtctcaatctcttgaccttgtgatccgcccacctcagcctcccaaagtgctgggattacaggcatgagccatcacacctggccgattccattttattaatagattttccatcctgaaagtaactcctaaaaaccctccttcacttaggtttcctttggctttttgtgtattaatcagactgtgggccctttggttccatagacattccttttacaccccttttggacggatgaatactcactagtaactaagtaattagtaagagttactacaatttggtatttataaagaggtggcctttcccagaattgaaggtagaccctaatagtccaatcagccttccatagagatagctggctgccatgaaaagctgagagatatcaccgacctcttactgggcctgctcatgaacagttagttaaaattcctgcaattttcagaaaagacccttatcagagtattatcagtattgtcttaagtttaatattggtttccagttgttatttttaaaaattttaagctaccgtgggttaagctttatgatgatctgtttaagtggtttgtttgattaacttctctattggagtaatggatgttttcttcaccagaattttgaagataggtttgtgttgtagttgaaacctgttttgtttatacacttactgctaaggaaaagcacatgtcattttgttttccatcttcatccttctaaagtagcacttcattgttatgaccaaatctttctttcttccttccttcctctcaccctgtcttttccttccttccttcctgccctccctcccgcctctcttcctttcctctcctctcctttcctttctttctttcttttctcttttctttcgttctctctctctccctccctccctctctctgtccccttctccttccctccttccttcctttcttccttccatttctatcacccctaaaattccatcatgctgtatcatctcactaagtcccaatctctggaaaccacagctctgttttctgttcctgtaattttgccttttcctgaactggattttaaaggattgtaggaggcagtagtggaagagctaactttatatcttgttcttttacataatgcgccctgatccacacttgggaaagtatattccatggtacctatagacagatatatgtgctttaccatgtatatgtgaaacttttctaatttaactttcctgttaaattagaactcggtagcataaattaatactgttgagtatacttagggatttgcatagatttaaaattgtgcatatgttccctagggccatggcgttaattggtttattagtcaggtggagtgcagagcctgaggtcaggacagttgtccttgaacatggaaatgaagagtggataatcaccatgtgttattgtttgggctgattttatctttaatgggtgattcagagtcctgattaatatttagagcagtgactgctggcctcctacctgctcattatcttcagaactttaaataaaatacttgatttctacccaagatggtagttatgggaagccttttacttcttcttgtctcacaaagacaactcttgacctctcaatccttaaacaaaaagttctgcttctgcgcatgtggggactcttaaactcattttcatgcctggagattcacatttagggatctaggaaaagcacatctaggcagagtcgatgaggagatgctttaagaaccgtgacaaggacaggaaggaaatcaattttgcgttaggtttgtatttttagagaaaacgaatcctggggaacttttcacactcattactattgacattaataccattgtcctgtccctttcacagttactaaaatcactcttgcccaccctcctgccttgcccacaacctattcccatgaaggggtgacttgggagaaataacggtttccaaccaacgttttattttggaaacatttcaagcacaaagagtagttgaaaggatagtctaaagaacactcatctgtgtcatacatctgttcaatccatggttgcttttcgctctacttacctcctccaccctctcagctctgtttatgtatgtgtctgtctgtgtacatacacacacaaacacattttcccctatgccatttaaaagtaaaggagcatcacaacataaacccctaaacacttcaccatacaccattttcttaaaggatgacattctctaacataactgcaatgctatcgttacacacaaatttaacagcaatccagcaataccctctgatatgcagtccacactgaactttccccagtgccccagaattgttccttatagccactgttttcttccagcatctagtcaaggtttttgtctgtcatgtctctgtaccttcatttagttttgaacagtctcccagcattttgttttcctttcatgacattgacttttttggtagggggacagagtctcgctctgtcacccaggctggagtgcagtggcgcaatctcggctcactgcaacctctgcttcccgagttcatgtgactctccacctcagcctcaggagtagctgggattacaggcatgcaccaccacacccggctgatttttgtatttttagtagagacagggtttcaccacgttggccaggctggtcttgaactcctgacctcaggtgatccacctgcctcggcctcccaaagtactggaattacaggtatcagccaccacgccgggctgacgttgacatttttgaagagttcagaccagttctcttgaagaatgtcccatactctgggcttttctgatggtttccttgtgattagattaatgttaacattttttggccaaaagacgataagatgatgctctgtacctaccactgtatcacaatctggaggaacaaaataacattttgttcctattggtatcactaagaatgttaaggtggtgtctacaagatactttccttgtaaaatatccttttccctttgtaatgagaaagtaattttttgatattttgacatattataatatccattccttaaccttttaccctatggttttagcatttatggatgatccttgtctaattcagttataatattggtggttgcataatggtggctttctaattctaccatactttctgcatgtattagaccattttcttatgtaaagaagagcttctacctctcccccgtctattcatgaatatcactgtggacatccaaggtggttctgagtgtacaaagaatgatatctctctttactgaactgccattggatactatttttgtcttggaattgtttaaaatggcagtgtatggaattgaaagtcctttctccagagagccacataaacagatgtctaataaatacatttccatattaaccaatccttttatgggaacaacacattgacataattaaaacacgtaacatgaaaactgtgctgaattgagaagctcatagagttttgtttcttttttttcctttttgccacttcaatatatatggacccgcacctgtcagtccaggtagctcatacatgccgtagcatctaatggtacgagggacatgtaatgctgaaaagaagggggaaaggagttgatcagatgagatataagtatgcatttatcagtgttgtggggtattcacttgcaccttccattggctctcgcagccatgttatcggcatataattcagttgaagatttatattcacctggaaattgtcctaagtgggccttgcttacttagctatcagactctagtactttcaaacaaattaaagattcaaaagattttggggatcgccttgctttttcccataggaaatcacttttgtcctgtctttttaagactattttaagcatatatttcagtattaaaatcgtagataatcttaagctgtttccttaacctctttgggccttttcttatctgtaacataaagttaaaacaggttatctcaaaagttacttatccctaagtgtctttgattctatgctaaatgttataaaggccgaaagggaaatggattattgtacttatttcaaagcttggccatgatcagcaaagtcttacctgatcttccgggtaacaactcttgtatcagagctataagatatagaaaacagtcttgtacatagagtgtggcatttcacatgagaccaagtgttctctgaatggaaacacacactaagagcaagatgtgaaaaaccattgtgtacaacctcatgtaaatgatcccttgcgtccgtacactatagtttcctcagtaactcaaaggtaaaacccaagtatcttgtgtctaagaggatcaaaatgtcaccttccttctgttttatttgttacatgcaggttttgtatagttttatagagtctttttatcactcatttgattttcataaaaattgggattgtttggaagaagagtcattaatattctttacagcttgttcttgttcctccttttatgttctctgctggtgcagacttctctcttatgtaaaatattccactgatgcccttggtagatttagaggttgttaaagaaattgtaataacagatcagggaacagtcagggactgcctgtcctatactgtctgaccctgactaaccgttctccttgtagttttaaatctttgtgtacagactgtaattcaaaaaacagtttttataaatttaaattcagcaaatctttccaaatgctaaggctttttataacgagggctagaaaagttgagttgtcagctattaatgccaatacctattaacaatggcaatgacattgaaatgattttttggatttatgaagggaacatgttactaatgaaaatagcaaatgaaaatggccactgtattagtccgttttcacgctgctgataaagacatacctgagatggggcaatttacaaaagagagagggtcattggacttaacagttccacgtggctggggaggcctcacaatcatggcagaaggcaaggaggagcaagtcacaacttacctggatggcagcaggcaaaaaaagagcttgtgcagagaaactcccgtttttaaaaccatcagatagtgtgagactcattcactatcacgagaacggcgcaggaaagaccaacccccataagtcaatcacctcccaccaggctcctcccacgacatgtgggaattgtgggagttataattcaagatgagatttgggtggggacacagccaaaccatatcagccacaaaggagagattaccctttttaaaaatctgtggtttgcccacaatgttttccataaatttacctttttctgtcaataaaaatgtttaggaattctatttatggatatgtatgtatttaatatttgcatatttagttcttattttttctctaaatggttatgacctgtactaagtaaaatcaaaacacacacacacacacacacacatacacattgtactagcagacctgctttaccttgcttgggataattatctgccatgattaaataaataaatttctgcaactgtttatcctggaatacactgcatagagttgtcagtttgagaagcaacttgatttcaaatctgagtctacaattttagcgtgtttccttgtgacttctagtttggggcttttaatttcccttttgctctctctaccctcagtttatgaacgagtgtggcatttcggcagttgaataggcctatggtagcctcccagtttctgtgttgtagaggatagttgccggcttattaaatgcccttgcaggactctcagggaagtctgttgtttagtgaatagtgatgaatcaatgtggatttcttagttttgacaagtgaaccatatggttatgtaagatgttaacattggggcagggtttctcaaccttggtgctactgatgctttggcccgaatcattctagttctttgttgtgggaagctgccctgtgtgctgctggatgttttgcagaatcctggcctctatctactaaatgctagtagcaccccctccccgccctccccctcccccccccccccccccccccgcccagttgtgacaaccaaaaatgtctcccgtaaaagataccaggatgaaatcactttttgtcagtcccaaactaactagagccagggcagcatgaaaggaggagggttcatggttacatgcctgagataaagactgtctcaaggactttctaaaatcgccccacaagaaattcctctgttaggactgcagcagtgcacgtaatatgctctcaaaagaacatctgcccagtaatggcatccccactaataaactgacaccagttctggcgttgagcatctgaaacgaactatgtttccaagcagcttatgtaaacttctgtttttaccaataaaagtttccctctacagtctcctcttcagatgcatcttgggttgtaatcctcatttctaattccaaaataaatttaacatatttggcgatgtttttctctgatgttttttggtcgacactccaaacattgttatatttcctctggggtacggcatcatttccggttgagaaccaccgacctagagaaaagctatctgcctgtgcagttcctttcaagggccccaagtgtgaattttgtgtatacctatattttaagccagatcattctgtacataccttctaagtccagatgaagtctgttagccttttatgtgtgataccatcacatagaaaccaacacaaggacatttactgtaatcgataaaggaaattttggacagtttgagaaagtaacttattttgtcttctgctctttataaaatctttacaagtgtatgtttttgctcttcaggatgactaggcagctttttaaaattctgacttcatacagattttataatcttccttttatttcttgcgatcatattgcagttgaattcccacccactgttcaattcagcagattttaacagagactccagaagtatagttcctgtctttaattaatctgcaatttaggaaagaaattaaggaggtatcgttctgtattgtttccaggatggtggtttcttgttatctgagaattactgggcacagtctcttgcccaatgtttacttctctatatagagttgacccttgaaaaacatagatttgaactgtgtgggtccacttataagtggatcgttttcaaccaaatgcgtatcgaaaatgcagtactcaagagatgtgaaacctgcggatatgcgttcagctgggcctactgtgggacttgcgtatgcgtggattttgctgtatctcaacagcaaaatccccgtgggagtggggctgcggcgggccaggaagcaacccctagcatatactgagggatgactgtactaattattgtagtttattaagtgttcacatggttttcacaaacctcacaattgaaatgccaattgccttctcctaaaaaatacaatgtacgtgttcatggtagctgggatgcagggcttgctgagaaatacttaattgcatttcttctgtagccatgaattgattttattaccttgagagaaaaatgagtattcaggtggacctcctggcaggcggttggcccttcagtgtccaaggatttatagaaagcacaacatcaaagaaatccaaaagttcttcggaaccccagcaactctcctacctccaaacttgccatgtaatgcccttttaaacttattatattgataggtaaatcggtttgctagaaattccagatattgagaattctttgtctgtgtaccttgttatatttgtataaaggtgatatttgtatgaagccaccctccagtgtgctgtaacagagcaatagtaatgacaactgattccttcccctagcttttctgttatggatagttgctggcaggtgaggaccaacagaaaaagaggagaaacccaacataattccaaactgtgaccatcataatggaaggagctgtgatagctttgctttctgtgtgtgcatgacatagaaggggaaaatggagttattgccaaaacaacagcaaaagcaaaacaaagccaacaaacaaaacaaaacccagggctaaatgacctttccaagagattttgcttgcatggcttgaaactggtgtttagagatgaggacaaggtcacccttgatactgagaggggattatatctgagacttatatgtatctcaacaaataatggtacttacaaagattatctcagtccagtgaatgccatcatacttatcttttgaccttaataacttcctgctattccaatctatccctatatatttttttctggaatgatcgaaatgtaattttagctgggtttaattctagttctgttaggtctttacagaagcttgcctggcttttaattctttccttcttcattgccagacaaaaggagagggaatataccactaggatacagagtagtttgtcataaaaatgaaagattgaaacagaatgagaacgtgaatccccgtaccttgtcttcagtctgtcagttggcgtaggtgagcagttttaaaagagccaacatgatggatcttgcatcttaggggctagaaatttgagaatgttcaacctttaagcatagaagaatctatagttttttgaaagagtagaacattctacagcctcccttggtaattcacactaatgctttaacaactttcagcatcaggaaattcttccatatgagctacagcctaaattcttcatgctgcttaagtctgtttcttcttgttctgtcctcagtggagagatcgaacagctggtcacaggcccctatgcgagagccattcacataattgaaaactgttattaaatcgccccttcagaagtcactcttgcttgttctctctctctctctctctctctctctctctctctctctctctctctctctctctctctctctctctctctgagaatctgggaagattccagagctgattaacatgttgctttactgatgaccttctcagcttttaatatgttaacgtgctctaagaattttaagaggcagatataatgtgcactgtttctttcattaatttgaccttctcgtgaagcattttgctggacgattgatctgctggacatactgggaaacactgactcagagattttagttgagtaggaaccgtgtgtgagcctacggtacagaacaaaagaaagtaatccagttacactgtctggagaaatagaggtacattctccgcaatcatatttgaagaatagttttctaaatgacaatggcaaactaagccgtgtcatatgaagaagaagtaaaaagaataggaatgaagaggcatggacagataagacagctctggtaaaatatttaaagggctgttcaaagaccaagaacttctgggttgctggtcagatggataataataatgacaataacaatagcaaacatgattcttgctatgtgtcagacacggttccaattgcctttcatttgctgactcacgtaatcataaaataactctatgaggtaggcactattaatatttccagtttgtagcagagaaaaagtaagacacagagagataaagttattttcctaaggtcacacagccagtgagtggtgaactccagtggtttaactctggaacttctatatgctgtgctgatggatttcagctcaatgtgatgcagcacttttgacaggggtatctggacacaggtgttcaggatcaccttctaaggatgtttcccagctctctcacatgggtggtgtagtggctgtaagcacacactggcatgggtaagagtttggactcgatgaatgctgagtttggactcagtgaatcctgaaagtcttacagctctgtggtgccatgccaaaaggatgaatggacttgcatgatctttttcatttttagattgcataattctttataaacttttttttccacaaagtacctctgtgatggaactctacacagagaaaagtgctcagcaacagctttttaaaatttaacttgtaagttcaggggtacctgtctaggtttcttatgaggtaaacttgtgtcatgggggtttgttgtacagattattttgtcacccaagtattaagcctaatacccattagttattttcctgatcttctccctcctcccaccctccatcctctgataagccacagtgtgtgtttttcccctctatctgcccatgtgttctcatcatttaactcccacttataagtgaaaacatgcaatacttggttttctgttcctgcattagtttgctaaggataatggcctccagctccatccatgttcctgcaaagaacatgatctcattcttttttctggctccggagtattccagggtgtatatgtaccacgttttctttattcagtcttccattggtgggcatttagattgattctaggtctttggtaaacagtagcatttgatcggaagtttgaactgataccattttgcagctaggaaatccaaagttaaacagtttattatagtgttgctaaatttagaattaggggtaatgactggagtgctgttgaggtgatcagtgttataagccaaatgacctgtcagtctaaaccctcctgcctttctatctgaaatgtggatatgtcctttattaggaaaccacattacaagagaagcaacttggctttgcagctcaaatacccatgacttgtgtgatactaagtattcccatgtcatatattcaactgaaattggctgtggaataagtaatgcttcttggttcttggcaaaagcaaaggagaatcatctctggagaaagcacttttattctaggctcaagcttttatttatctctagaaaatattggtaaggtcagtttagtacgtggtaaaaaaaaaaaacaaaaaacatattaagcacacaagaaatcaaggtggaaaaagaaagaaatcaaggtgaatgagaaccagaagaaatagcaaaccatagaagcagacctacgataacatcatattccagaattattagacagattattttcttaattgtgtttatgcagttagaaaaataaaaaacaacattgaaaaatatctacagggaaccacaaacctgagaagttaccttaaaaatgaccaagtagtatttctagatgtcaaaagtacaataatcaaaatttaaaactgtatgggtttacagcagaccggcaagagaaatggatacccagacagtaaggcagaaggaattaataagaatgaagcacagaaggatgttttaaaaagatgtggggcagagaggggggaactagggaagtcctgttcagagaaatatagattgaagaagagtaacatttatgtaacagagttctgaaagtagaatggagagggaatggagaagaggcactatttgttgagagaatgacggagaagattccacagctgattaaagactctaaatcacaggtttaagaagtccagtgaatcctaagcagtctaaatcaaatcctagaaacagcacaagatagaaaacagatagattatctttattttttttattttatttttattatactttaagttttagggtacatgtgcacaatgtgcaggttagttacatatgtatacatgtgccatgctggtgtgctgcacccactaactcgtcatctagcattaggtatatctcctaatgctatccctcccccctccccccaccccacaacagtccccagagtgtgatgttccccttcctatgtccatgtgttctcattgttccattcccacctatgagtgagaacatgcggtgtttggttttttgtccttgcgatagtttactgagaatgatgatttccaatttcatccatgtccctacaaaggacatgaactcatccttttttatggctgcatagtattccatggtgtatatgtgccacattttcttaatccagtctatcattgttgggcatttgggttggttccaagtctttgctattgtgaatagtgccgcaataaacatacgtgtgcatgtgtctttatagcagcatgatttatagtcctttgggtatatacccagtaatgggatggctgggtcaaatggtatttctagttctagatccctgaggaatcgccacactgacttccacaatggttgaactagtttacagtcccaccaacagtgtaaaagtgttcctatttctccacatcctctccagcacctgttgtttcctgactttttaatgattgccattctaactggtgtgagatggtatctcattgtggttttgatttgcatttctctgatggccagtgatggtgagcattttttcatgtgttttttgcaaaggagcaacagtcatctttactattgacttctcagcagcaacagagatagacgaaagtggagtaatatttcagtattcaaaaacaaaataaaaacaagaccccaaaacctttcaatcaaaaattttatacttgggccaggcgcagtggctcacgcctgttatcccagcactttgggaggccgaggcgggtggatcattttaagtcaggagttcgagacctgcctagtcaacatggtgaaaccccatctctactaaaaatacaaaaagtagccgggtggggtggcgtgtgcccatggtcccagctacttgggaggctgaggcatgagaatcacttgaacccaggaggcggagattgcaggagccgagatcacgccactgcactccagcctgggcaatagagatagagtcagtctcaaaaaaaaaaaaaattgtatttaatgaagataactatcaggaatatggattttttttttaaaaaaaggaggtattttcagacaaacagagcttgagaaatgcaccaccaacagctaaaggaaattctaagggacatatttcaggcagaactaatcccagatggaagatttgagatgaaagaaagcaatgaagagcaaaaaagtagtcaatatataggtcaatctatctaataatataaaaaattaaaacaatcctatagggttgaaaaaaacaaggtataattaaaattcatgaatatagtaacatataaatcaaatggtggtattttgagattgttgagatcattgtcctgtctgggatgaattgtatttcttacatttagactttgaaagagagagaaatagagaggcagacagaatcaacagggcatcatgaaaacagcgctaagccaggaggtttggattctattatcagctctgctgctagctgtatggcctttgaaaagctccttttctggtctacaaaatcagtttgcttgtctgttagatgaggctttggaaccagatgaattttaaagcccctcattatgattctatgagaaacagattctctagaaaaaaaaatcagttgtccccctcctttgaaattttatcagtaaacacctgcatttcacttctggctaacttttatgtatcagttcaaaaattaaagctaaataaagtctcgctcaggtgtgtagtttgcttacctttctcgtttgttggttttgttttcttttcttgtcatctagtagccaaaaagagtaatggcagtttaccaaagccttaggagtgggtagctctttggatatcagggagcatttgcagaaacaagctgtgaaaagccagcctagctttgcaaccattgttctttctatcttttctgtttaacttattaatcgaactgatatacacctcctttgccatcttgccttctttcctttcatccttttgccctccttctctctccctcctgtctttgcaggctaataataagccagagatcgaagcggccctcttcctagactggatgagactggaaccccagtccatggtgtggctgcccgtcctgcacagagtggctgctgcagaaactgccaagcatcaggccaaatgtaacatctgcaaagagtgtccaatcattggattcaggtattaggaaccaaaaaaaaaatgtcatttttttctcatcatttttcacctttttatgacttgatcttttatctcctgtgccagttgctgttagttcgtaccgtctccaaagtgggagagaaggtgattgggctggaacatcgatcattcctgtcaccctcctgatcgctaggttattttggtggatctcacttattaggctggtgtcccttaccaccttcactcttcagctcttcggagccacatttttggttgagcaggccaaagtgcgtgtcttcacggaggtattacagatgaactgtacctcctccttcctggaaccaaaacatttttaccatctttcctttttcacggtctttcctgtttatagaaacttcccaagaatcagttataaaactgagagatgattctattctgggaggaaccataatagtagctcagtctctcattcactttgcaccatttttttttctcccttaagtaacaagaattgttttcagcatcttagaacttgcttctttatctgtgaatctgattacattctttgtatagtatcccagtgaacttctaaaggaataaaaagtaggcaagtaaatggaagattcacaaagcagctaaaaaacaaccagtccttatacatttagaagtgaaagagataggaaacgtagcaggttattctgatagtcttaaaatatcatggaaaacaaggccaaataaatctttagccctgctgacctgtttggggagacaggatttttttttaaatgaattaatctcacttaacattaatcctaaatcctaattctgaaactgcgatgtccttaaatgtgtgaatcaacatcaaggtttctatagtgatgaataagccacaaagttgtaaactagctctatggtctatgcctgtgcagaatccacttagcagcaaagtaaacactcttttccagttacgtgtgaactggttttgttactttattttctaataactaccttgtactgttgcgtgctttttattcatagtgcttttttacttttggtgtttattgttccatagtcatgctgtttacaaagaggttttacaaaaacttttagaggtttctgaagcctagatagacaacagtgagtaggtactgcttgcaaaggtcaccttctttccttcccggtttcttggcaggtaaaaatgataccatgggggtggggagtggggaagggaagccacagtgactgcattagatttctaagctaccttttctctgcttccttagctagtgggctttgtatacaagggaaatttttataaaataaagaagaagaatgccttggaggatctgaaagagcactttcaccttcaattcttttgcccttatcatattatattattttaggacccagcacttctcattcctcctgtccccctcttgaaagatggctggaatctaaaaaagatagctttccttcccacttccccatatgtgacataagaaatatgtttatttgaattggctaaggttcttatctgagaaagcaaaaggcaggagagtatgaaacaaagaatatcgcattctgataatggaggaaatgtaccaactagtatttacagattataaattcttccatctaatccaaatttcatgttctcttggggcttcagttatcatttgtaggtaatggggtgagagatttctgaagagatagagataaaagagttcattcgagtaactgtttgaagatgaatcgtatcagtcaattagaaaacattattaaagcgagacttgttttaattgaaagttcttgttcacatttcttttgtcttgtgaaattgctttatcttgacaatgttttgaaaataattgcttcagaaaacttttgtcccatgatgggtaaggggcatgcacagcgtaagtctgtcgctcctggaagttcttttaaatttgagtatttggttttcaaaagactggaaattttccagtaccttcctacttaatctcaaagagttcctagtggagtttaaataaaagctgagtttttcttccctccttccatatgtttataggataatctttctgccaaaatgttttggtactgtaggagaggcaccggaaaaatctggaggcagaaagttaatcacttaccttgtgggactaatgaacattgctttctgtttctcaaattagaacgtggtagaaggtttattaaagagtgttctttgggaatttgattcgaagaaatacatacgtgtttgtttttgctctttatcaggtacaggagtctaaagcactttaattatgacatctgccaaagctgctttttttctggtcgagttgcaaaaggccataaaatgcactatcccatggtggaatattgcactccggtaagtttgacgccagcctgacgtgagagttagttcacctgggataaatttcagttttgtacaatactgcagatcatgtataatgctgtgatttgtcacttccccagatgttccccagctaaagtggctctcaactgtaggcttcaggatttaccctatccctggtgcctaggggagtgcctggcacatatggaacatgatagaccctcaataaatattgttggatgaataaatagggttttcattctgtgtgcatggttgtattgaagacgttttcacgtttattttgcacagccttagaggttgtgtggggcgatcttatggccatgaggcatgttgagtatgggggatggttctaggttcccccaaattcataaactaccacttttaatcaatgttgctcacctattatctgtcctgtatactagtgacattttaaaaatccattttatatgctaacacttactaaatgctaggcatttaccttttaaactaccctgtgtaaaataagtactatgatttttatcccctctatacagatgaggaccctgaggtcctgaggttaaataatttactcaaggttctataagtaagagttgaagccatctcctaagatgttattttaggaaaatgttaagtggccaatagaactgtgaaaaatcactagggaaatggcaaggatgtagacttggtggccagacagacctgagtacaaatctgcctaagaattaaagacaggctcctctcaggtttgttttttctaaaataaacctgtccctgttgactgtagagccacccttcgtgtttctcttctctttctttaattcttacagtctcctcttctctaaactttgcatgcttgctattcaagatacggtctgttgactaatcatcatatgtctattggcattaccttggtctttattagaaatgtgaaaccacaggccccaactcctgatgctctaaatcaaaacccacattttagcgagatctgcagctggttcccatacacaacaaagtatgagaagctctgctttagagcatctctctcttccatcatcagagtgatcctcccagatatttgcctgtctcacttttattcctcttatagagatggtcagtgattgagaatgtaccatgctatgaatagaccgaaatttagtgggtgaagcatgctatcattttgtactaagtagtttttaaaataccataaagtgtggtaaaatttaatgtcacctttttgaccttaagacctataaactaccatttattgagtagcctagtaagcttgtatgtttcttttatttatcataacaacgtgttgaggtgttgttgctcccattttactgatgatcagagcctctgagaagtaaataactcagccaaattagtacatgccaggcctggtttcagagccccatttgtctgattccaaagcctttgctcacaaccacaacactctccttaattacaaaacaagtgtcatggggcagaagactggagtggtcattagttttgaaatcatcctgtcctaaatctgatctcaccatgatctcccttttagactacatcaggagaagatgttcgagactttgccaaggtactaaaaaacaaatttcgaaccaaaaggtattttgcgaagcatccccgaatgggctacctgccagtgcagactgtcttagagggggacaacatggaaacgtgagtagtagcaaaagcagaacacactcttgtttgatgtatatttgaactcctctcagctgaacaccctccttcactcccaaatgcaaacagtctcttctatttctttctttttatttacattagctgaaaagagaaaaataagctgatgtccagttgccactttcccacgtcacttgacaatttctttttccaaaagttaaactttatctcacagggggaaaaaaaaaaaaaaaccacaacacaatacagccactaattgccttacaagccttataagaaatatgggactgtttacaaatgagtgattccagtatttcattttgattttcctctctcacaaatcagtaaatgtgtgtctttttgtatctcattgtgtggtcatatctagtcacttgtttctactcaaaagaaaatatagtcacaggaaactacttcacagtaagtagtaatgattctcaagatcaaaggggacgtcttcacctcttttcaacctgctcctcttttttgccttaactctgatggcagtcacacaactgtgtgtttttcttttaattcactttacaccttggtttggctattgctttccatggttcatacttaattggctggattttatttattttgacctttcagtaaatttttttgcggctgagtttgcgtgtgtctccttcaccacctcattttttgttttgcagtcccgttactctgatcaacttctggccagtagattctgcgtgagtactttttttgctgaagggtgctgctaccaccaacacattcgctcgcttggttctcttttgttctgtttatttgtttgttttcttttgttttgttttgttttatggacatattaattccccttccttcatttcagtttttttttttcttttcttgatgagactttgaaagtaccatctacacagatcaggagaatcagagtgggttttttggttcctccaccaggtgaaattcaaaccagcagaaatcctggcttgaattcaaattataatcaaagaagttattggagttttagctgtattcctgggagacatgtttatatatttcttcatataaaagcaaggaagaagcttctgattacataataacattctttagccatatttcttgagattcgatgctttttagaatctttagggtctgttataagtggactattaaaaatcagcagaattcgttttaaagtatgatgctgagtttggttgaataattttaatgaggtgtgcggactgtttatcaggttatgccatgctatttgactaatcattatatacaagggtttctaaattttgaactaaactcactttgctctcctctccaagctaaatattcagctcataaacaattatacatttgctctaggaggaaagtatttctttgttattactattggtgtgtattaataatactgagcttagataccagcagatgatttatctcagagtttataatgctagaaaactcttttttggggcctgtgatttctatattagcaaacaaagtgcctattttaaaactacattatgtagggttgttataacaaacttttggtatttcaaagtatgctttattaaaatatttattgaaaatcagacagctctgttatggataaaggggaaatgaccaattcggaagataagcttgtgtaagaattcaatttctttttattaaatcttttttattgttccaccatataatttaatctaaactagatccttttttaaaaaccctgtcgtgataaatgcatattattaattgaggtttattttcagtctttaataggcctaaaggaagtggaaggctatgctttcctttttaaaacttcgttattgcgccccttaattttgagatatggtagctataagtagtatattatctgatttatttaatcatcatgcttaaagaacttagggagttatttaggttcagttatgtcctctgcctcttggaaattgtgtttcctaacccaggtagtctgttatagaagttacaaccgttcataaataagaaacttttaaagagttgatacactacagtttcagcttgattggatcctgataagggaatggatttactctatgtggaaataagtttaaccgagtaagaaatccaaacgacaaatatgctaaagaacagttgttacaaatacatagataaaagtagcaccaaataataaacaaagagtaattaatagtccttgaaaggcaaaaaggagctacacgtaagctaatgagaaaaacattatgacaatcagattaacttattttaagtagaagattttgtctgtcttaaacgttgaaagactttaaaattaataacatcttttatttaaaaatattttctaacaactaaaacacacctcccaatttgcctttttatgaagagttggttagattattcagaaatagtgggaagttttaattttgaggaagaaaacaaatctagcagactgaagtctgtgttttctttaatagcagtaattgtatttaaagtatttattcataggattataaatactgtataaaatatattacaaagccatcctattcaggcataagagccaggtcctaacgtgtttcattttgcaagacttgtatctaatgttaacaaatcctatgatgattacaatatttgatccatttgatatggatcacagaatttgaaagtttccagagatacagaccgtttggttttccttagactaaactcttatttgcttgtgtttgtcatattactttaaaactaaagctaacataggcctttacgttgtctgtccataagtgagccagtcaaacgatattctttgagcgattctgcattgaaacctaaatgaatgtcagcttttaattaatagagttttcataaaagagaaggtggtggtgggtgggatggaattgaccaagtaggtcattaactcttatagtaagtaatccttctgggtatatggttttgtgtttaggaagtgggaagcggggaacagtattattaccttcttttggaagtgttttagaaggctttgcacttagttttgtttgtggactaagtggctttgtattttcactaattcttggtttttaaatgattcatctctgaccagtactcccttttggctcattttctggtttaataaatgtctcttttagtgtatattttttaagatttctggttattgtaagttcttgtgcttatgcatgctgtgataggcgccactgatattaataagaaaaataacatggaattatccttgaggcaaagaattaaagctctgtataagattttctgtataaaatggtattaaagtattttggatttatatgcctacttttcttggtgtacttatgctccaaggtcttaggctttcattcttgtacacacttccaggatagcaactattacaagggaaaacactactaatgtattttccctgatggtaggctttttgcttattaaaaaaatatgtaattgaaagactggtctgttccaaaagatagttcttataatacaaataatccaagtattaatttatcttgatctgcagtgaagatttcaaaacagaccttagcatttttctaataatgggctatgccagggttctagaagattaacagattaactctccaaaactatagtgaagtttcacatggaaatctttggatctgcttattaaattgagtagtcatcgttttgtttcctcttgacaatttaaacgtctttataactcatttcaatttgattatgattacacttgacctagatgacattggtttcataaataagacctttctctctcagggaagaattccatttccctagttatttgctatagtgtgtcgtaattatcttactgtagtatattaagaaatatgaatttctggcacattttctaatgcaagcttagctactggtaactgcatctttttcttttttaatgtaagaagaaacaaacacattctccttagtgtttcaaccaagtccttcaacgctacttggacactgggctaaaccagggtcctctctgaattacattatcgttgacttttggatttatgcctttacctaagggctttctgtgtcagcagagaaatggaagagaccttttgtgctattccaattaaaagaaaaagtccaagcctaaactggttttcagaacagatggttttttttcctaaggttaatccaaaagatactataaaaacttcaaggataattaatagatcagatatgaaaggatgaaaaaatgttaaccctaccagaattctagcctatggagataagaaaagataggtgtttatatacaaaaagcatatagactattcctgctaatgatctcctcttattttctcacctatgttttagcacacagtatctctaagaaatatttcagatatcatgacgttctatgaaatttagtcattcttttttaaaacctcacaatataatccagggtcattctattttgtgctagaaattagtggtatagtcttgctgctgaattggaagatacatttcttctttacaaaattgcatagatcaagacatcttgatacatggagttttaagaagtcttgtactagagtagcctctttgaagctaaaataattgtaagtatctaggcagatatacagctttgatccaataagaagatagcctataaatggcgcaggtgtaaactatttaaaattttaaaccacatagggctaacacaatttcggaattataggatgtgagaaattacaaagtaggaggacaaaatgcttcctagaaactgtctcccccaaccttttctacgatgggaattttccagagaagattttggcctctcttcatggcttttaataaaagcagaagtatgagaaatcatctctcaatcctggattttaaaatacttgataatatttaagatataggagcaactaaatgtatacattatccatagaattagaataaaagcattctaggccatgtgtataacataactgtgtggtgggttttttctccattaatggatggtatctgtgactaatcacattttctgccttataggcctgcctcgtcccctcagctttcacacgatgatactcattcacgcattgaacattatgctagcaggtatgagactagttgtatgccaggcaaatattgattgaaataactaaccaaggaaagctaacctatgatattttaaacaaatcttttctttttttccccaaacttgtctgattcctactaatcaacttgccctctaacgtgcatgccgttccactgcatgttgtttttggtcaccaacaagagcattagtccagaataatcttccctaaccctggcttttaaacatttccggtagccttgctatgtttttttatactgagcacatttactaaattggcttacaaatagtttaacctccttagaaaactgctagaccagacattcatatatgaaaaaatgatactatattatatggagaatatgaaagcatcagctttccgtttgtgtatttattttacatgatatgctgtaaagaagagaataattaattttcctaatccttggacttttctgtctcaccttctttgtgtttgagatgatttttatacctaaaaactgaattactaattttaaaatattttatgcttgttaaatccgtaagagtttggttaacttttttagttgtaaaaaaacaaacaaacaaacaaacaaaaaaccccctgtataattgcctgaggtgaagaagattttaaaggtaaaaattggtggcagaatgtttagagagcttactgtgcatccatcctttgtcaatattctaactgctggacatgtttaccaatcgtgaaaagcattagctagctgtgtaagtctgtcatcagtggaaagtagtaattgtcctaaaagacaaggggtagtgtaaggtagggagtgcacttattgttagggaagcttttcttctgaaaacaaagacctgttctcagtgaaagcaagactgatctgtagggggaaaacagtgaaatataactttccttagaatttctatcataaatgtagtgctactaactagctgtggtctaccacacactgcctcaaatggttaagccaacacacacatcctttaatttgaaggattcctttctcttcttgccatgatttatcctttagttttcaggaatgttcgattaggtcttgaatagattctaagacgtcacataagttttaatgagcttttacgttttttatcaggctagcagaaatggaaaacagcaatggatcttatctaaatgatagcatctctcctaatgagagcatgtaagtatcccatctctttttacaaaatgttcctgacaatgaaattgctttgagggatttagaggtaggatagcacaggatataggaattagcatcatattcatttgatcttttaaggagccattcatttacttttttcctttaattcttaatgccctggcatggaatgagctcatccaaattctggcattattagtattcagagtagcaaaaatagtttgccttactcttatttgaacttatttcataccatatgattacaaattgcagagtcccaagtatttatagtaatgcttaatctttgaccaaacctgccagatatttaaagggataggatattaattttaaagtcatggctaagtactattttctccactcatggggagtggaaacgtgatcttggtatagcatggctattcacatatggtaggttagttgggcattttccttcagaaatccaaagaagtagatttttgtgatttagcatcttcacaagataaataaagtgaggcaatcttatgaagagtttccagaggagaagtaccaattcaggttgcaggttgttagcaggatgataagccaaccctgttaaactttaaggacggagatagagcggtgctaagagcagcagggaacacagctatggcagggaaacaggcttcattatagagtgagggcagtgttcacaatacagagcacaaaggaacattgccatgaaccaagtaaatgctgaccggggcttgaggtagagagagcagacattgaagcaaatatgaaggaaaaaataaggatttgccaagtgaataaataacataaagagaagaaatctagtcaaagtattacgatgcctttttagtttgataaagtaaggatatctcacccatcttggagaatatagacaaagggaagaatggtaaatttatcatatgtagttggtgtggcaacacaaagtcatgctcagatgagaaaagaaccttcataaggattaggccaaaagaaatagtatcaaagtggcatatatataactagttattgaagacatgagaataaataatctcatctggtacataaacgatcaagctaataataaagaatcaagtcaaccctcagtcatttgtatatgacttacttccttcaaacaaacaaacaaaaaagcctttccccaaccataactgtgatgccttatctttcttagctatgggaaaaagtattaatggtactaatatataagatacttcaacagtaaaatgtgtggccaaagaatcagccaaatgtaaatagcttgtgcttctttggctcactgattttggtattagaagctctagcacattcagattaattcgagttgtatctacgtaacagtggctgtcattcattgactgcctaagagaacaggaagaaaagtgtagttacaactctaggttataattaaacatgggaagttctagcagtacaacttcagaatttggaatgagtgtgataaattaggtggtaaaactgcttttgttttattttaaaataagctttagcttattctgaggacataaaatccattttgactcaatgttggatggcaaaaactcatggcattttaggggcaggtttggggaagtggtttggtggattggttgacttcacttaaatgtgtgtttttaatacccaataattatttttagtcagcttttcacatctaaaccaggtaactggcttgataaacaaaaataattcaaatgagaaggactttttcctaaatttctgatatttttcaacttaagtgggtatggagaggagaatattagcgtatcatcttaatgatatctaaccagaaacaatgagctttagcctgtcattacggacagaagaaaattcttataacttggaggtaaacaggcctttccggagcttggagcaatgcattcagaaaaaagtttgtcctgtgtattagagagttcctagtttccaggaaagattgtagctgcctccccaaatagaagcctttttgcctccttttcccgcaagattagtccttaaaaccattatgtataaatttaaaaataaataaaacttgtatttaaaaaaactctgccccgaggaatgagatgttcagtcttcttttaatcagtcaccttaatgtcttttttccccttaattttcgttcttctgtctaaacaataactgaatgaaacaatcatgtatctccagtttaattgttgttgtcattctgcctcaatgacttatataagttaaaactgacttactgaagcaatactttttggttacattgccttccacttaataaaatatttcctctgttacttttagagctgcaaggtattttttcctactcagtacaacaatagcgtgggttagtgaacagattatcttgacaggcttggtggccaaagcattatacagccattattatatcttttaatattttttagctattgactaacatcaacgtagagtcccagtatttctgtaattctgcctttcatttatccgtgtaaataggccaatcaatttcatttgaaaatctgagcaagaaaacactttgaattggtaccagtagaatggtagatcacaacctcagcagtatcaaaaggtctttagaagcaggaaaaaaggtctaattaattgttaagagcaaataaatgtttctattttcaaatacactcctgagtccctaacccccaaagcaaaataagggggggaaaaaaccaaaacctttgattttattttccagagatgatgaacatttgttaatccagcattactgccaaagtttgaaccaggactcccccctgagccagcctcgtagtcctgcccagatcttgatttccttagagagtgaggaaagaggggagctagagagaatcctagcagatcttgaggaagaaaacaggtgagttttctttctagctttgtcattggtatgcagagtgcatacacttgcacacatagaaaagtgccaggaatcttcacttagagtcattttatgtctaattgttttctaaaataatctgtttagctccatttgcagattctctctctcttttttttttttgttatctgaaagaagacaatggatgcaatagtatgatgaagaactcatattttaggtgtgaaggagttaatgctgatggtggtatttgacttgttgcatgtgtctccaaggctttgattttatatttcagaatagaatttaagaaaaaagtaggttatttaattttatgattatatgattttttttacatgtgtttggccatattatctacctcaaacatttaagaaagtagggttattggcttggtcatattgggaaaccaattgtttcatcttatttttcatcatcaaatgcagaaattattatttatgctcaccatcatagcaggttagtgagacaattccaattgtcagccatcacctgtaaaagacagtcatgtaaaaatagcagaaattgtagaagagaaaaaggctaaagaactctcataatgactgcagggaggacaaagatgtaaacatctggggtactgtattgtgtcaggataatgcaaatcattggactttcagttctgtattacatttattatgtcacaggtcccttggtttaaaaagtcttctcacatgatcacttctaactcacaatgtgccttcttcagacagatgccaccaagcaaggatttaaagtagatgttgctcagatttgtgggtcttaagtactttcatctctttggttgagcccaaggcaccaaaagctcttaacgtaggcaacgcagtgtgtctgagatcagtgccctcgggagtatgccacttcaggatgaaaaaacaaactgccactcttccattgcttcctgctgccactgcgagccttctagctcttaacaccttttacctatggccatagctccttatctggttggcttccctttagtctctttcccacccttgcaataaatcctccatactgactctacttgtacatcttgccagaaccaagacccatcatggcattcccctttcactggatttctgcatgtagaaaaaaatcaagcttcttagtggggcgttcaaacccttccacaatattctcttgacttgctttttctatgccatcttcttttgttctccctgtgttctggctatgctgttgtagctagtatttctgaatacatcctgctctcatctacctttggggtcaagctcaagcttgagtctcagcctaactgctaacctctaacccaccactgccgtatctgacaaaggaatcccacctatcctccatcacactgctcaaaataactttccccatggagccctgctagatccctgcagttggaagaaatctgtcttttgcctctattcccagagcactttggacctttctcagaaaattccttgacagttttcctttttatcagttattaccagtgcctctctttaatgagctagtgtgtgtctttggggcatggactgtatcttaatcatcttcatatcctccagagtacttagcatggtttgaatatttaatggctactcaggaaatgtttgctaaaaacctgaaaatacagcaagaacatcacatgagtaccatccacgagataatattgaactttttttgttgttttaatgatagctttatttttggccgtacttttgagatcatttgtcagtgaagaccatggtagagaaaacatttctactttattgagaataatcagtaatatccatttatgttaaatctgtaattattgtaggggtcaaagtcaaatcggaataaaaagttggaactgacactgtaaatagaatttgatgttaccaaggagtaaatatatttttgaagtatatgatcgtgtaatatatcttttgagctcattggtcaagagccctgcctcgtttgtggttagcatagtctttctccgtaccattgcacccgggtcaaagaatgtttgtaaagagtactgataactatcatttatttatcattttatcattttgagtgcacttttacatattttagatcatttaatcttcttacaaacgctatggagaagagactgtcgcctttctgtgaatgagacacaggttcttagaggttcacacagcttgccccagatttcccagtcagccagtggtagaactgaattgaaatccagatttttctgactctaaataggcaactctgccttcaaccagataataaagaagagtaagtctctgtgaatgtcatttacatagaattgcggcatattccccagaatgtgccttaacttgagggactatctatgaggactgagtgtcccggaataaacctgttcatctacttgtggcacagcgataaccgctttaccctggaagatatccaagaccattctccaagaatgggatggtttgttctctaaaagaacaaaaaacataacaccaggcctacttagagctccaaaatgaggactctggggttgatgcaaatctttgtgtaagttaccttgaccttcacgaaatgatcaggatgagcttccttcattgtcccttcattttgtcctatttgaccttctaccaaattccaaagaaatgtctccacagagttcccttcctgaaaacagcccgtgtgttttctttgatctgccctgtcctgtcttcttgcagttctgcgcaaggagcttcagagccctagatttgccttcgctacccttgaattcagtgttgcttaaggagcctttaatttgccatttcctgttgagaaaacccaggaattctttagatgccctctctgtgcatgtctagctggctatgtcctaagtcagcattgggctacgcaatctgacaaatacgagcatacttttagagaaaataagaaagtatatttaaaattgagattgccccaagtcctttggatgtgtacttattgatctgttaatatatatattttatgttcctttagctgtgatttatctccaaataacagcaaaagagagaggcctggagagccccattcctgactagatatttattaaattccattaattgttcttattcatgacacctccctacaaccccctagaaaaacagaggatggctgtttgagaagtgtctcagaggtatcttatctctgcctttagaattccatttctcctggttgttgcacatagtattcaataaatatttgttgaatgcattaatgaataaatgaattgaagctgaatttattttaattgtagcatacatgcatgcacttttgactaaagttcttttacaaacctaatttcgtagagaaaagcctttcaaagactttgttttctgcttgcttttcaaaattctcccctttttcaaactgccttgattagcaccaggcatggctttgtcataaatttagaatgttaagaacccgttttccaaatcacaggcactgtatgtatcccacattggtgttctctgattcttggttgatgccacagagataaggctaaagctctgagtaaaagctaaatctgactgagtttttcccatagtgcctcccataagtttggatgactaatggtgttagtgagatatctaatctttaatatttcgcttctgcatcatatttctccctcattaccacatataattcagatacatctttatttggcaaagagccactggatcttgggtttttgccccattgtgtgtccttagcattgcagactcaaggtttacttttttttcttgcgttgattaaagccttcagtctcctgacttaagcctgtagtgttcaaatacagagatgtatttgtctctgcactgtctaaataaaccaagacttgctctgaaattcaaggtatgatcctagcaatgaaaaggtagcctttctgagagacaaagacattgtcgttctactacctgcagagcaaattgattagattgttctcaagtcaacaaggtggctaaatattaacctaattcaccataaagtctaaagttaaagttgttagtagatgttatataacacgagggaactctgtagattcttaatacctactcaggacctttcatatgtcttgttgggcagtaagaccttatgaagccaaaatttgagttttctctttttcctttaaattcctccagtgattgtgcaagattattattgttacagtcaaagaagttctagatcagttactgataccactgaattaaagtagctggaaatcatgatcccgttgctttactttgtaattgacttgatgactttggacctagtctagtagctatcaatcttcatagctacgggaaatctttattcaatgttctttcattaggtctttgtgcaagtctccaatgatggtgaaaagatggccaaaatgaagggaatctgaagaggttaggaatgggcattcctatggaatataaacaaaggtgtcagggtgaggaatggcagagtttgtttgagggaaactgcagttgtattaccttttttaagaaggcaaagaatgagaggagatgaggctgaccaggtcagcaagggcaggtcgggaagggtgtggtacccactgcagagttgctgcctccgtgcctagtctagggagcaactcaagggtgtgatccaggagtcaggccatgatattgacatgaatatacgccacacaggcagctgtgcggagggtaactttgaaaagagcgatgctggaacgaggaaatcaagctggggggagtcacatgggagcccaggaaagagatgattagagccttaagtaaggtgatagaaatgaagtagacaggctgatctgagtgatatttcgggggaggatagagctgtttgattcggtagttctgtgggactagggtatgaaggaatgattcccagggctggtaactacaaaacaagatgatagtagttatttgcagctgggactgataattcaggaggagttgcagcaggtccatcctttaatgcagcagtgtttattagaggtccttcctgaagggctgagtagctggaaggtgataaatgaggtatggaagaggtcgagttgaggtcctggtgacatctccatgtgtaaatgtctgacagtctgagagatagaactctgatgcttgtagaaaggatataagcctgagatattaggactgtgagtcgccagctcacaggtggtagttgaaaccgtgagaatgaatttatatatcccgggagcatgtagcagaaggagaacactggatttggtagaactccggaagatgtgaacattaaagtgtgtatttaattacttttatttttagtagagaatacatgtatattattatacaaaatccaaagggttcaaaaagacatatagagaaaagtgaatccttctccaaccttctcccctggctgtggtgtttccagctctggaggctgccatctttcttggtttcttgtgtttccttccaaacatgctctctacatatgcaaatatttgcaaacatatttatggttgttggggttacttcacacagtgtcgtgcagtgttcactctggttttctctttttacttaaaaatctctaattttcacatgctggagaaatgtgccagaagaagaggagggcagagcttgggaatgatgggagcattttcccacaggaggcaggagagagaagggttagggaactaaagtatgggaggaggcgtgaccttgaatgagaggaaggactgcctctgaagacaaagtggtaggtaaggaatttagggtaaggaagggaggaaagaagcataatggaatgaatgttaaaatgtccagtagacatcactggaaataattcaagactgattcctacggctgttcccacatgtttttaaagttggagtggagaggaaagcgtggtatatgatacatttaacgaaactaggcattcaagttacttggtgtattagtccattttcatacggggcaatttacaaagaaaaagaggtttaatggactcacagttccgtgtggctgggaaggcctcacaatcatggcagaaggtgaaggaggaggaaaggcatgtcttacacggtggcaggcaagagagcatgtgcaggagaactgccctttttaaaaccatcagatctcatgagagttactatcacaaaaacagcatgggaaaaccccacccccatgattcagttacctcccactgggttcctcccatgatatgtgcggattatgagagctataattcaagatcagatttgggtggagatccagccaaactatatcatttggtgacatgggccccaaaacaaagggctacagagcccttcttgagacaaagggagctagtttgatcacagaaatcagaaagccaagaccttttatggcaaggatgaataagagctgaagggcatacatgccacatttaagaagctgtgtaagaatggggtcaaccatctcagctctactcaggcagggaggacaggaacatggtagaagtggaatcaccattattcacagactcagtttctaactagcagggccagtgtaactaaatttccttcagtttatccaaagttaattgaagtctgaggggactgattcatagtatgcagttcatggcagtgaatggataacccagaatgaaagtttatttctccctttatcctaattatctctctttttaactgccttgtattaaaatgttatcaaggttgccttaaagcttttttaggaggagacagcatctggtttaagtgcaaatactagatctattaaaatgaggaatatattcattttttcggcacacagcatcctgtgtcttagaatccagtgtcttaggaatcacaataaaaatcaaattgtgttctggtgagcctagaatcttggcatctaaaattggatgtttgtgaggactgcttcatactacaaaaaaattgaagcacccctctggcgattagaatattcacatcttacaagtacagctgccatctccctagaacatgctggataagagtttatgttcttacaatccaatttcccttttttttttttttttttttttagatttttcatgaagaccctcatcctcctgttggccttcatttgccaattgtccctctacagtagaattgattatggtcatgagtttctttagctactttccaggcctgaggatgtaattctgttcaattctgcagatagttactgagtgcttaatgtaattttaaaattatgagactacaaagatgaataagccttggttcttaccctcatggagctcaaaatttattttaaaaaagttaaaatagaaacaactacttatatcctactgttacaagtgctctgggggcacagaggtgaatgatttattctatcagagggagtagagaggcctttacaaagagagtttaagagttgaagactgaatgggagttttccagtctgagagatgggggaaggatgagttttccagactggtggaccagtgagtaatgtgtggcttggaatgaggagaataagagggcagtgggatggtaggtggggactactgtttaaaggactttgtgcatcatactaaggagtttgggttttatcctataagcaggtgaacagtgatggctttttgacgggggggaggattgagaaaaataactgacctggcagaaagctaaagccatgaagattggtagaagcacagtggaatagtccattaaaagatgccaggttcttaactaaggatgtcttaggcaagtgaagaaggggatggagaaattagaaggtcactgaatgaatgagaccaagggaaaatggagagggggaggcatctggtgttacggaaagttttaatttgggaactgggaaatgatcattgaaaaacaaacaaaagcaacctagtgcacccaggaaaaactcctgatttgcaaagggttagtgcatggagagaaagagctacgtatcagacatactgaattctatttgcccaaggacatttcaagtggaaatttcctatgttgattttacgtattcagttttcagaaaggattctttaaaaagtcatagcaatacaattcctgcaatataaataatagatcaatgaacatcatagggattagcatagttgatttgactaagcttcagattcagtttgagcttccctgtagccagggagataataggaaacaaagatttgtctgtctcttaatattgaattaaagaagcacgcagcatcctaaagaaacatcattgttttcctggctctacgtaataataataataacaaaaatagctgtcctttgagtgattgctatggacaggaactgttctgagtacatatgaactcctatttaatccttaaaacaaccctatgaaagagaggctgtttccagaggattacgtggcacagagtattaaggacacttcatatggccagcaagtaataggacctgtattcaaacttgggtggtggtcctgaactcttaagcagcgttacacttgaagtgattattggctagtgtccttatcaacatttttataacaaatcccaagggaaattatatgtggctgtttctcatggcctttgataattgtggaaagcttaacattaaaacaccaaagatagggtgacagttctccaaggataaaggtcactgttgcctaaaatgtattctgcagaataccactgagatactctgagaaaaaaaggattccaaggacagtaaaactttgaaagcactcatactggaaagtcatcattacgttagcatttgcactgaggagtttggaagtgaagaaacctgattagctttgtctaacctcatgttgctcccacttacttgacctcgagcccaactgcaatgttatatggaacacactttggtaaagaaattcaagtctgaagtaaactttgaaaaccagtctaggagatagcatagttgactctctactgtagttgttgagaagcctatccgttgtgtctctgggaacatcagaagataaagctataacaggtgcccacgtaggaagcctggatttttcgcacaaaagtaacttttcatatgctctagtggtgaagcagttaccctgtagacccagaagccagaatgatttagtctgaaaaatctaaagataggtattaaattaactctcatgatcatagaaaattctttgcaccatttttgtagaatatcccaccgaataacttggcttttcacccaaaccaccaagaaaaattgccaccagtgacttgatgcaattaacttgctatcgggagttctttcttgtgaaatgattgaactttgaaagatgtttaccaaagacagcacctttagcttcatcacaattactgtggaatctttctttgtaagtagttagatgcaaaggccagttgttgcttgaggcctctcctggattgtgattttaaagtgtatcatcaacacatgggaagatatttctccctctttatcttatgacagaaatgcaggtatagctttcatctcaaagtaagattaaggtataagttacaaagatgtgtagctactatatggtcctgtgtaatgctacttgaggaaggctgttcctttcctggcactgaaattttagagcttgcataatcagtatatcaacctcgtgtggcttggtgcttagcaagtttcagcttctagagcccatggctaatggagccatccaggagaatgttggagagataggtctgaagccttagaagagaagtcttgattaaggagtaatgagttgcgggaaggggtcatggttgtggcggagatggaagcctggggagaggacagagacctcctaggaagagagtttgtgtaagaagaagaccaaggacctcctgatgtacttgattgtaattgggcatgagcagcccagttagaaatggtttcctgttggtattacatatgtacatggatggcttctgcagatggctaaactcacccattttatttttttactatcttaatagttaaaatatgaccttttcttgtgtctccaaattctgagttaccttatggtgctagtctgtctgttgtaactacaagtcataagtaaatccatatgattcttttcctgtaatttcctggtaaatcaaggcgataatttcaaagataaaaatctgtatttttagctttagcagtgagcatgattcccagtctttttgccttcgagtaaggtttgtttccatggtggaagtaaacaatatcccacactctagaatgtgagctcttcaagggtaagggacagtgtcctacatatatctttatctccacagcactgggtacataaatgtgtcataaaaatgaatgggtaaatatcctttggagtttttctgttacttgatgggtttttggggttgattttcaggtatctcccttgtttttctcatttcttacattattttctttcccaaaatcccttaatatacctgtttagtttgtgatgtcattttccattagactgaaaccatccaagttgtttaggctaacccagacttaagcattttctgggcttatttttggactctttttaaaactcatcatctgaaaatatttaatgtccacacggataattctgaagacatgtgcataccatttttcttttatgtacatgggttaaaccttgatttttccatagtaggagaaagcattataagattttattgttttcactggggtaatatcttttgtgctataagaaataaaattttgaatctagaacttagttttttataagacctttattgagatataattctcgtaccataggagttacccatttacagtgtattagtcactgattattagttaataggttaaccagtattagtaatcactggttattaattacagagttgtgcaaccatcagcgcacaattttagaacatttttatcaccccccaaaagaaatcccatccccattttcaagtcactcctcgtttctcctgcaactactcttttcagccctagcagtagacaatccctgatctactttctgtctctatggatttgcttattctggactgttaatgtaaatgaaataatacaatataaagtcttttgtgactggcttctttcacatagcgtaatcttttaaaatggtatctatattatagcccgtattagtatttcattctttctttaatgctgagtaacatttcattgtatggatataccacattttttaatctattcattacttgatggacatttgggctatttctacttattgtctgttatggataatgcagctatgaacattcatgtacaagtaccggtaattattttaaagaagttattctgggctgggcatggtggctcacacctgtaaacccaacactttggcaggctgaggtgggaggatcacttgagaccaagaatttgagaccagcctgggcaacatggggagataccgtctctacaatttttttttttaattagccaggcatggtggctcatgcctgtagtcccaactactcaagaggctggggctggaggatcacttgagcccaggaattcaaggttacagtgagctatgattacaccactgcactccagcctgggtgacagagcaaggccctgtctcaaaaaaagaaaaaaaaaaaaaagattctatagtttctgtcattgtaatagaggaggccataggatcatatatggcaagagtatatagcagtgcatgccagggagtgaaaaataggccatcaaattgaagttactgggagaacttaagactaagtctaactacgcatgagggattgaagccgggacacacaaagcttaaaattatgattcttctagagactgttacggctttttgctgaccacagacaatgaaagtttgatattttgctgtatttgtctgaaaatggaaacacacttttcccaatggcagtattcctgaggactagagttcttcacctctaaaacctctccaatcctagtttttccttttggctgatgatgaccagccactgccatttttgtcttaggttttgttagtctgtcttatttccagttataagtggttaaaatttcttatgaattcttcttgtgttgaacttttgattaatacatttagtctatagacagtaatgaattagcatctgatcaggaatttgtgaaaaacatctcagtcattaaagattaagaaactgaagccaattaatattgtcatgttctgtctcttggaacttgagcaagatacagatctacgtgtcaatgacatatccagaaaatagactccacctagatacattaaccctgtacccttggtccacatattttatttcagcaatgatccatggacatattataatttgacagtttcatcacatacctagcgtattgggtcaaatcaaggaaatctcatcctagtgatcttaactcagtgatttcattttgcccagatgttcagctgtgataaactttactaaggcacagatgatggatgatacacaataattccaaaatttgggggtggctacaatgtggctaggggctagaactcaggtatctacaggacaaatactgagtgattagtcactttctaagcgctagatatgcatatgttctgccaagctcagtaggtctaagtagattgcttccatttcagataattaagtgctttctttttataggaagtttttagcacatctgaggttctaaatccaaaaagtaaataatatatagagaaagaagtaataacaataataatagtaaccaacatttattgaacacagtatgggctgggcatggttcaaagaaagtttgacatatagaatgtcgaccatactggcttaataatcctcataactgaattagtgcttaagtcagttgcccagcctcagcaagcagcagaggcaagtaagtcataaatcaagatcttctgaatccaagaccatctctcaagccttgttctaattctctcctcagccatggatggtgaaaggcaccacaaaggcagcgtgtcaaaaagtggcattgttcaacctttcccctgatggggcaaagcttttatttttttcctttacgttctttgacatctgttttaaaatgcagatatcactagaagaaatgacaactttattataaaatcccagtaaaatgtaaatgtcttatataaaacctttatactgagcaaatttcagtaggaaagggcttggaagtaaggctctgaatgttttaaagggggacagtgctaagaaatgattagaaacaagagcctggaggggtcctgccatttttactgttttgcttaaggctgacctaaaatatgcatagtcttacttctcaccctgtgagcttatccttattaatgtctttttccacctagtttaggggtatttttgaatttgtgtttgataaagatgtctaaagctgtactgtaaaattttattgtcacttttttttttaaatggagtctccctctgttacccagcttggagtgcagtggcatgatcatggctcactgcagcctcaacctcccagactcaagcggtcctcccaccccagcctcctcctcctgagtagctgagactacaggcatgtgtcacgacatatggctaatttttttcaatttttttgtaaagatggtgggggtgtctccctatgttgcccaggctggtcttgaactcctgagctcaagtgatcctcccacctcaacctcccaaagtgctgggattacaggtgtgagccattgcactgagctttattgtaatttcaagggctcaatgcaatttccagtttttaaagttcatcttgcttgcagaatttgtctttcatttaaaaaaaaactgctgattggctacatttatagctgctgtaatagttctgtatgatttactacatttgcctgaatttagattggtggatatgatttagctgcttttaatattatatgagggtaaagccagatttctttggatctattccttttagatggcaatctttgtagttgttctactttacaaaataatccctgtgtgtgctcatgctttggtatacagttaaatgtatgatactgttaagaaaacattgatcactggaaagtgaccttcatttctttatttcataaatatcattatacaactatataactacacgtagtagggaagctccatttaaagagtagatgacttacactgaaatcatttgacctttgtaaattagtttaaattacacagagattgttgtaatgttctttatcatacataatagttacgattgctagagaggcactcataaatcattgctaaaagggccagctgctttcatgttttcagcaggttgagttaagggaacaagccttgccaatttgattaatctcttatgtccattagttggttgggaagtttttttgagtgtaaatttgtatgtagacaacagagtttatattctttatgacataaaattaatcagatatatctacatatttgtagaatggggggattcttagctctatagagaataagaaatactggatggaagactttttttaggatgactggctacaggaagaaattgtagtgacagaagccatgtgtattgaatttgaattaatgttccttagggagctaccagagaaatataatttacaagataatcaagaacgtaaatagattctctgtggagtcgttgtctgatcactgacatatattcatctgtattgaaatgacttcatgactacattctaacaattagagaatcattaggggtgagatgtacgtgtataccttcaagaaaagcaaaatatgtattggtaataattgacagctgttaaaacgagtgcattgtgtacttgttaaacattagaggctgggcatgttggctcacacctgtaatcccagcactttgggaggccgaggcaggcggatcacgaggtcaggagatggagaccatcctggctaacacggtgaaaccctgtctctactaaaaatacaaaaaaaaaaagccgggcgtggtggcgggcacctgtagtcccagtgactctggaggctgaggcaggagaatgtgaacccaggaggcagagcttgcagtgagctgagatcgcaccactgcactccagcatgggcgacagagcgagattccgtctcaaaaaataaaaaataaaaaaataaaaaaaaaacattagaataacttaccttggaacagtaactctgagggaaccttgatcatttatgagaatgatctcccctacgttaatactgcatcaaaactaacattatggtatacctcaaaaagtattggcatagatgtttttaaatataagaaaattcaaatgcgtaattgataagggctaaatggctcaatttcccaacccctaacaaaaatatgccctaacacagctctgtgactatgactgcatttattagaaaacatttagtaaaaatcatctctagttcaaaccctccagcatcagttcttcttgataattctcatgaacatttagaaataccttaaaagagaattcagactcaaatcaaaaaaccttatttcatttggttgcaggccaagatacctcttttaaccatttctggcttttagaatccttatcatgacagcttgtcctatctcagagcttcaggaggaaaaactagtccctcaaaatcaagtttgctattgagcttaataagaggtttctgtatgtcatatgtttgtttagaagaaaagcacttgttcgactcatttaatcctggcctgatgaattaaggcttgaattaatactgagggaaccttgactatacatctacaaaatcaatgtgtcctggtaggcttctgattaagataacattagctcttgcttgaaggcatctttctctgctcctaccatttatccagtggtagataatatatggagtgaaaaatgaaaaagacatagctgggctttaaagcaagatgaacatctctgtgaaccagaaatgtgaaagaaaaaaaaaaaagtaagtggggctaaattagtgggctttcagctcgtgctgtagtaacagggattaaaattctccttacaaggtagtggcccaaagccaggattactatttgaaatcagagccccacaaaaacacacctagagagagacacatacacacttacacttaaaagcaacatgaaaagaaacagtttgctgcaagggtctacagcttatatgcagctatggccctaatgcatagagccgagggaagaggcaaagattcgcagttgggaaagagagcatcacagccttgaaaccaggacctgaaccaatctacctactgcctggcaatgaaatgagtgatatctctgtatcactcagtgtaggagctgcaaactaccaacagatgtggctctaaactctaagcccctgggtatggctgggagaagccataaaaccacctgagagagagataatgagtttaaaaagagaggaaaatattaaagtacacacacatgagaataatagaaaacatacacatgcatatgtatgcacatgcaaaacatcccttgcaaaatttgtctccaaatcacgatccaaaatacatgaagaaatgggatagcaccccccacccaagttaaacatcaaaaagtgaattaggctgggaacagtggctcacacctgtaatcctatcactttgggaggccaaggtgggaggactgcttgtgcccaggtgtttgagactagccagggcaatgtagtgaggtgccatctttacaaaaaataatttaaaatatattagccaggagtggtggtacatgcctgtagtcccaactactcaggaggctgagataggaggatcgcttgagcccaggaggatgaggctgcattgagccataattgtgccactgcactccatcctgggcaacagagtgagaccctatctcaaaaaaaaaaaaagatgaattaattctagaagaaagcaaaataatacactagtacaacaaagatttttacttacatttaagatgctcagaccaggtgcagtggctcacgcctgtaatcccagcactctgggaggctgagatgggtggatcacctgaggtcaggagttcaagaacagcctgcccaacatggtgaaaccctgcctctactaaaaatacaaaaattagctgggcatggtggcaggcacctgtaatcccagctactcaggaggctgaggcaggagagtcgcttgaacccaggaggtggtggttgcagtgagcggagatcgtgccactgcaccccagcctccatctcaaaaaaaaaaaaaaagatgcttaaaggcataaataaggggtaccactcgctaaaataacaagaaactaagaaacagagatggatgaaatgtaactaggtctgaaaacaaagatatctttgccaaaaaaactagtcattgaagttactaaactcaatatacaggataaattctagactttgtcctgtcagagaaggcaagggaattagaagatgatgctgagaatgttactgtgtacaacactcacagaaaaagataagaaatataaatgagcaattaggagaaatggagaattgaccacaggctctacaatataccttactagaatttagaggtttgtttaggagtgtatttgagaggtttcagaagaaaatggaggaaatggtagagaagtaatatttgaagctgtcatagctgagaatcttccagaattgaagaaggatgtgagtcttgaaggaaatgtgctcccaagagaaatttcaaacatctgggaaggaaagaaaggcctgcattgagcaattgatattctttacagctcagctttggctgattaaaatgagccttttctgttttcactggaaaccaccaaaacagaaatgtaatgtgttgtatataccaaaccatgcctcttgaacaagggtccttataaataaatcataaaagaagagccctgtggacaactaaacccacaggatcaagataccaaggaagatctctctagaaaaggcagtctcctgtcagcacctttgtgaaaaataggtgggaagacagtaatggcttgttgtaccatcttgaggtccatgtctaaaaactgttttcaaaaggaacaccatggctgccccaatctggtagaaagaaaaatttgaataggattctacataaaaagtgttgccagttagaacattttgttgaagttttcttttaatgaagagggaaaaatagaaagtaattcctatggaatgagaccttgtgaacattggatactgcttcaagttcacagaaacattgaactgattgccagttaagttctcagaaattagatttaattaatgtggacagttacatacatcggtgcacacccagaagacccgtgtgcagaatctgactgaaggtgtacttacttcgatgaatctcttctcatcactgctttgtcaaagcagattgctatgaaataaactatacaaacaactacccttgaaggctgatagcaataggatttcaatcagtacagataggagattctatttctgtagatgaaaaagatcatacattgattttctgtgtgactttaaataaattcctggaaaccttgtaatgttaggtactaggtagaatgaaaaaaatgaagcaaaacaaaacaaagaaaaaaaccagagtagattgggttttctttctgcttccatgtggagatctagccttttgaaactgagcattttggaagacatgccgtcccctgtggaatgttcattccgagtatgggacaacagaaaatatttagcagacctggtgatgagatgatcttgctttctcaaactggacaatgggaaaactcttcttggctactcactacttacatttcatctcttttctcattgatatagatctcccacatttgtggataggaatttctctcacctgatgaaatatcatctgtgaacaacagaaatctgtcatcttattttggtatttatcacaagtagaagaaagatgtcaagagttctaatcagtcactggatatcaaatatcagaaatgtcctcaattggaattgtattctcagtaaatcctaaagcatttgggaccttcacatgtgctaatactgtttatatttatttggaaattaaccaaatataaccaaaagacagtggaataaccatagaaacctttaaatggaataaaatttatggcaatcaacattattaggaagaaaaagtatactacctagaaacagtgcaagaacaacgaggatcttctgtgcatctaactatataggtctagaaatatataaagtgaattatgatagaattaaaaggagaaactaacaaatccataattatatctcaacactcatctaacaaaaattgatagctacaaataatcaaaaattaataaagatatggacaattttaacaacaaaatcagcacactatgtatttagagactccatctttccaatggaaaaatacacattatttcaagtactcaatgaacatttttagaaagtgactgtgaactaggtcacaaaaagaagtattgctaaatttcaaaggatcagtatcatacaggggttctctgattgaaacgcaattaaattagaaatgcactaagaagtgaaaatggaaatataaccactgtgctcctaaatgactatgggttaagttaaaagaaatcacagtaagaattacaaaacataaggcactgaattgaatcaggtgatgtatataaaaacttttggtatataattaaagtggtaccaaggaggaaatgtataaccctaaatgtgttcattaaaaataaaaaatcaatgacttattcaacctgtaaagcaagaggaaaaaaaagagtaacaagtaaaacattattaatggacataaaatgagaccatagtaagtaaggagcttcactgcattcttggatgtgaagactcaattattatgaacttagttcttcccagtttaacctatgaattcaatgtaattcaaactcaaaatttcaacaagcattttcataaaatcagaaaaccaaacactaaaatcatggagaagatcaaaggggtcagaatagtcaagacaattttgaggaaaaacaaagtgggctgagaaggcctatcagacatcaattgatttaaagctggagtgtgggatctaccagggatatgcagatagaaccacagactagaatacagagctcagaagcacacctgtatatttatggacacttgatgttttgcggaagcatcgttagagatcagtgggaaatagatggaccatacaatgaatgaggctggcttcatagtttatccatgggggaaaagtaaaattagatcgcatgttcacggcaagcacaaaaatagattctgggtaaattcaagtcctaaatgtgaaaaaccaaattttaaactttaaaatgtaggtgtaagaaaagattttcgtgaacaaaacataaaaagcagagaacatacagggatatgttaaaatttacatcttttataccataggatgccataagcaaagttaaagataagctacactaagataagggtagaagatcatatttgccatgcacataactaacaatggattagcatctagaacatatccaaaggtttaaaaagaaaaagacaatccagcaggaaaatgggtaaaggaagcatgaaaagccagttaacatggaagaagtctaaccttgccagtaatccgggatgtatgtgcaaattaaaatgcacccatcaggttaactaaaacttgaatgtctgataacaccaagtatttggtgaggaggtgggccaaatggaaaacctcattcactactgaagcgagagtaaattggtaaaagcaccgatttgtcacccagagcgattcggtgacatgtagcaatgttgaagatgttgctaagatccaacaattccacatcaaactatattctgtaaagaatctcttcaacaggtatccaaggagataggtataaaaaagaatttcattgtatcattgtttataatagtgaaaagttggaaacaacctaaatgtccatggacaggaaaatgttggcatattcaagcaacagaataataataccttatggcagttaaaatagcaaactattatgtatcgacctggagaaatctccaaaatggtgttgaaggcaaaaagcaactcttagaatggtatgtatattcttaaatgtgaagttcttaaatttaaagtttaaaaacatgcaaaataatgttattagattgaatcacataaaatgggtgtttttgtaggtgaaagaaaaatacaggcaaacatcagcatcttttttaagctcaacctagtatttgttgatacattcatggtaacactgggcatgaaattcagtgtggcattatctccttgagggcagcggggaggagagaatggtatggtgttgaggcgggcatgtgagggagcttctgctttggctgttaacttttctttcttcaaaaaacttttgaagaaaatatggcaaatgataaacttatcaaggggaggtgataggaacatgggtatacttactccattcttatacatttctgttgaaaatatttgctaatgtttagagcaaaccaaagtgttgatagaggtataaaatttttaatctcatgacattataaagaaatatttacaaagtgattaaatcctttgctgcttacttatctgaacataccagtcgcgaggcttttagtgtaacataaaaaattgaaaagcatggctcccttcacacaccaggcaaaagcttcaaattttgttttgttcttttagcactggtaagattgtcatcattaaaaccattcattagtgcctcttttgcttgctgttcttcggtggcagtcagatgcatctatctaccatggtatataaaatttggtgatgatattcaaattactttttttcttctttttctttttctttctttttttttcttttttacttttttgatgccaataggaatctgcaagcagaatatgaccgtctaaagcagcagcacgaacataaaggcctgtccccactgccgtcccctcctgaaatgatgcccacctctccccagagtccccgggatgctgagctcattgctgaggccaagctactgcgtcaacacaaaggccgcctggaagccaggatgcaaatcctggaagaccacaataaacagctggagtcacagttacacaggctaaggcagctgctggagcaagtgaggagagagatgggatttttacaaacattcatttttccctcttaaacaaaactaaacctcagagagcactttttataggtgcaacaagcatcaattcttaagtgcttggtatgtgcctgcaaagtgatagtatcaaaggatagaagtagaggagatagaaaaactagtgtgtcttttttgtatttgtccaatattgtttcctaccaaaatggttttttcttgaccaatttgaaatacatcttggggaaaaaaacgcctaaaggtttccactagttctctaaaagtgaatatttcacttcttgaaatggaactatttcatttacaattagttatattttctggtatacctttgtgttttttttctcctaatccctaacacatagttctttaagcctccatcgaaaacctagcaagatactgcattgtaagaggacctacctggacatagttctggctttctgggaattttaaatttttcaattatgttctctctatcttgttacttaatacttcacaaagatatgaatcttccattacagttttgagatctcacatagtctcatcattcacacatgaccttctaaatcttccagttatttaatgtaatgatgtatagtctcattccagtgtagctctgatttttttctcaaatttataagggagcacaattcagatacaaagacagtttctatggattatatcaacagtgaaatatcccaaattaaacaatctttgggagggcttctaaagtaggaagggtcaaaatttatgagtcctgagtgtgtatcatattttgaaatttatacatttgtatgtttattatgaaaagtaattctgttttcttttggatgacttagccccaggcagaggccaaagtgaatggcacaacggtgtcctctccttctacctctctacagaggtccgacagcagtcagcctatgctgctccgagtggttggcagtcaaacttcggactccatgggtaagtgtcctagctactctcagattttgttgtctgaagaaaggtagagtcgtattacagggacatgaatatttggccgtaagtgtttgactcatcttggtatcagggagccactgaaaatcatataccaggcgaaaaaagtctaaaaagaaaattctaaaaaggtgtattctggcagctctatctggcccacagaaaacttgtataggtgagaagaccagttaggaggcaattgccaaggccaagattggtgagttctgagggcctgcacttgagagatgtgggaggagaggactgtgagactattctataaaaatagacttgccagggggctgggcgtggaggctcacgcctgtaatcccagcactttgggagggtgaggtgggcggatcacaaggttaggagttgaagaccagcccggccaatatggtgaaaccctgtctctactaaaaatagaaaaattagccaggcatggtggtgggcgcctatagtcccagctactcgggaggatgaggcaggagaatcgcttgagcccaggaggcggaggttgcagtgagccaagatggcaccattgcactccagcctgggcgacagagcaagactgtgtctcaaaaaaaaaaaaaaaaaatagagttcccagggtctggggactgagtgcaaattgtaagaagaggaatgaagggagaggatttggttggaagaagatagtgaaacttctgattgtggacataatgtgtttgagaaattgacaggtcttctaagtcatgtcccaaaagaaattaagatacagatctatacttgaagtaagtgggcaaactggagagatttgagaatgagtttcatagaattgattgctgaagggtgtgagatgagaaatctataaaatctataacacaggtgcttcgatccagtgccttggaaaagacctccatttgggtaatgggatagtaaaggatggataagtagggaggttcaaggaagatgtgacaaaaaggtgaaatgctaaagagagctcaatggaaattaaaataaatcacagtccattgggtcactataaatgcattgggtaattttgagaaaccattttaggccaagagaagggaaggtggaaaacttctgtttcaatgaaatgaaagactaggtaatcttaaaatgaatgaggattaaggaaagtgaagacaattttgaaacattaccaagtaagaaggaagccttaggcaaaagttggatgaatttgttgaggaaatggtccacatgttctgttctcattcttagcaatgttctctgcctaggactaggttctaagaaaggtggagctgatgaggcataaatgatcaaaggtcaaaacaagagtagggcattttacagtggtaatgaatggctaggacaggggttcctagccagctgctcattggtttttcctgctgtgtctggctagacaatagagggttttatgaaggccacaaatacttggtcccccttcctcatttctctttctctgtaaaggcccagtaggagtcagctccatcctctctccttacttttccctgggacctaaactggttatatacttggtcctctcaaatcttacctcacagaatagaaaagacctgtgactccttgattccatacacttacagctctattgcctgatatgatgatgtgttcaggaattcatttcatacttgagctcttccatgagggtagaataaagggaggcaaagtgccttaaccaaaatggataggacagaaaggaaaagtcaggggtgtgggtgagttttatggcgaaaaatttggagatcacagtcgggaaaattcaaaagttggatatcatggaagtaaaatactttcaagcaatttctacatctaacatggtgcctcccagcgagctgctgaagattttacttggagatcactgaggggtagggagtacagttcatggagttgatgagaccaacgttgctgagcttatcagcagaggggtgaggtccagatcctgacgacagtggtagatcaggatggaaaagatgttgaagaagatggacgagggctctgaggagatgaacatttctgaggaaagagacagggtagttgaaataaatgtgatgaagttcaagaacctggagcagtgggaagaggcacatcctcctctggagaagccaaatcttgtaggaaagccaggttttgatttttttgagaaggaaaaggatatgtttgaggttattttcctgaatttactacacctccatgatttaaggcaatctctgtgtcagattatctccctccacctgagatctgaatatagctaataaactgttgggattgtaaatgacaacacactacatgaaaaacaactgtatgcatttgcaaagtctgtaaattctgaaaacaactgagctttagtacctcttatttttttctacttcaggattttcccccttttttaagtaagtaaagcatatgaaactaagttacatattttagtggtcagattcagagccctgggtgcttagaagcattaataattatttaggtcgttgacaatggcgaataggcagcatactcgttaaagcactcaaattaaagtgcacattaggatgtggtcctgatgatctgtggagctaaaaagatcatggtagaactgaataccaggacaaaagtgctatattccaatggctaagctaagagataacttgctggcataaaatggataagctgtgttaaatttgtcctctgaaagaaaagactgaattcaagggtactttttcttgaactgtgtattaatctgttttcacactgctataaagaactacctgagactgggtaatttatgaagaaagaggtttattgactcagttccacaaggctggggaggcctcaggaaacttacaatcatgggggaaggtgaaggggaagcaaggcatgtgctacatagcggcaggagagagaaagcgaggggagaactgccacacttttaaaccatcagatcttatgcgaactcactatcatgagaacagcatgggggaaaccgccgccatgatccagtcacctcccaccggacccctcccgcagcacatggggattacaattcaacatgagatttggatggggacacagaaccaaaccatatcgaactgcataagctaacttcatttaaaaaggaaaaaagccttaccgtcttcttgaaggatgcacacaggtgtttaaataaatgcagtgtatatacttgggctttgaaggtttgagatacaaggctgggatctgctgaaccacattctggatagagctgcattctttaaatatgcaaccccgatgactgattttcttttaagtgaaacatgagacaagtcatattaggtgatgtgtctaaagagtcaacatatttcctcaagccatgaaatacttatcactgagtctctatgtaccatttgtattctgtacagttcttactgagacaatgtgctaatgaaacgtacattctattggaggaagcaaatacagaacaaaatagcaattaacaatgtttatcccctattggctctcatgggctccatatacaaatctgtgatgtccagacaactccttatctctgatgactcctaactttccaccagattactgttttttgaagcattttatattttattgatttaaaaattaaactgttcctttgctttttaaaaaatttatcatgtacatttgaggtttatgacataatggctccctagctttttatttagaacaatttcaaacttatggcaaaactgcaattaattcaacagtttgccacatttgctttatagctatttatttatgtacttttacattcatgtgttgttaaatggattgcatatatttagattaacatgtatatctgtatgttaacatatttttatatactgtatatgtttatattttatgtgcatatttaatcatattcatgcgtgtatatagtttgtggatttttttttcactgatccactcaatggttaggtttcatacataacacttcacccctaaacacttgaacacgtgccttctaaaatgaaagatattcttgcataagcacaattatcatgctcaaaaagaacaatactgttatataatgtagaatttaaattcaaatacctccaattctgccaattaatattcttcatagcgatattttacattcaggatcagtgatgtccctgtagtctcctttaatctgaagcactttcccagcctctttaaatctttcatgacattgatatattagaagaggtcgggctagatgttttgtagaatgtcccccaatttgaatttgtctgcttgtatccaagtgattgggttcgggttaaatgttttatgccagattaccatataggtaaggtatcctcagtacatcacatcaaggttttcctcaagattctccatccccttcaccgttcttcactctccctgggcgctccttccatactttggcttctgctatgctgacaactcttaagtcaagatttccagcccagacctcccacctgagcatcttctggataaaattataaataaaaatatagcctaatctgaaatcatgatcaacctttggagcatctcttccaatttcccaatctatacaaagtcattttctaccccttcttcctttacctgccttccttagctatgttccaccaccatcaatccagtcaccaaggtcagtgtgttttgctacttatgaaaaagagcaaaattcttcaattcagctacttctgcccaaatttagccctcatcatgtgttacctgaacagacaatatgaatactttcctaattggttcctctgcctttggtctctctccctttctaagctatcttccagaaacttcagttcctcttctaccattcaaattatatcatattattcccctctttaagcattttatgccttctgtttgacaacagaataaatgtgctctttggccttgagtacattatgttcttaacctgaaatatagcatcctttcttttcactcagtgagttttcttttggaacttaatcatgcattatatcattctggttttgttgttgttgttgttgttgttgttgttgttgtttcttttgtgtgagacggagtctcgctttattgcccaggctggagtgcagtggtgcgatctcagctcattgcaacctccacctcctgggttcaagcgattctcctgcctcaccctcctgagtagctgggattacaggctcgccaccatgcctggctactttttcttgtatttttagtagagacagggtttcaccatgttggccaggctgttcttgaactcccaacctcaagcaatccacccgcctcagcctcccaaagtgctgggattaaaggcatgagccaccacacccagccatgttttcagccagttactagtacttctttcttctgcctacaactccctagaacttaagctccttaaggacaggatgtaagtcttgctcattgtcgttactgtatgaggatactctgtgcaacaaacaatcagtaaagtgcttgttgagttaatattttagaaatcaagcataatacattcttgtgtacacatggaacagcccacacgtttaggaaatttagctactagtttcagtatctttcaccaccattcacaactgatcagctaataatcagcaacaacattgtacaccataatatgttaaaggtgttacacacagaatttatgtgtgaaattgaaagcatcggtcctatatcatatggaaaaaaattaattgtagccaaatgttgggtattggatacatcagtgtgctttttcttctaaaaaatactggagaaaggcaggaaatacacaagtactaagataataacacatcaagtcggaaactggttaaaatccaaagaaaaatgttggtgggcgtatttgttcatacacagccccctttatgagaaaaaataatttcttgtacacagctcctttttaaaaaaaagagaaaataatttgtttagattcagacaaaaacacaggagtaattcttgtgtctattctgcataggctgcgtaggttctggctaaaatcactttttaagcagatagaaccattatcagcgtttgaatcaaagggaagtgagtcagatgggatatcttcccttcaagaaagggatctgaaaccatcgttatatttcagaagactgaagaatatcttgccatggcaaagcattccttttcttttttctcggattaaattgagtcatcccacttcttttttcttcacttcagcagtgattaaaggagactatcatattttgctatatcacggtactatttaactttgactatgtctttccttattttaaaaaatgtttcagtgatttatttggaccacaatcagacaagccaggaagaccaaatagctaataatccaaaaaacattatttttctctttttattatttcagtagttttcagggaacccaggtggtgtttggttacatgaataagttcttcggtggtgatttctgacatttgggtgcatccatcacctgagcagtgtacactgtacccaacgtgtagtcttttatccttcacccccctcccacccttccccccaagtccccagagtccatggtatcattctcatgcctttgcatccgcatagcttagctcccacttataagtgagaaagtacaatgtttggttgtctattcctgagttactttacttagagtaatggtctccaactccatccaggttgctgtgaatgccattatttcattcctttcatgactaatattccatggcgtgtgtgtgtgtgtgtgtgtgtgtgtgtgtgtgtatataaacaccacgtacatactgcattttctttatccactcgttggttgatgggcatttaagctagttccgtatttctgcaattatgaattgcgctgctataatcttggtatgcaagtatatttttcacataatgacttcctttcctttgggtagatatccagtagtgggactgctggatcaaatggtagttctacattttagttctttaaggagcctccatagtgttttccatagtggttgtcctagtttacattcccaccagcagtgtaaaagtgttctgttttcaccacatccacactgacatctattatttatgcatgtttgtggaaatcaccttggagtagagtcaagtttaagtgttaaagcattgccatcaactaagtttaaaatcccccaaagactagcaatatgctatttgagcaggcaatgaatctgtgaagtagggataagggctgtgcaggtctctagtgtgcaactggaactcagtattttcttgttgaataagtgaaaaaagtgaaaaggtgtttttgtttttggtgatgaggggcttgtgatgacaggtattattgttagagtcagaaatattttgaggttgcctattaatatggtttggctctgtgttcccacctaaatctcatctcaaattgtaatccccacgtgtcaggggagggacctgatgggaggtgactggatcatgaagaagttttcccccatgctgttctcgtgatagtgagtgagttctcaggagagctgatggtttttaaagtgtgtggcacttcccccttctctctctctctctctctctctctctctctctctctctctctctctctctctctctctctctcctgctgccatgtaagaggtgccttgcttcccctttgccttccaccatgattctaaacttataatcatgaggcctcctgaggcctcctcacgcatctggaactgtgagtcaattaaacctctttcctttataaattacccagtctcaggtagtatctctatagcagtgtgaaaatggattaatacacctattatgttgtagctacatagtgtatgattagacaagccataaatattatatctggcttgtttcatgcccataatagtgtatcagtcagctgttgctgcataacaaataaccacaaaattctcaagttgcatatttctcattcacgcatctgttgtttggctgaacttttgctggcaatcagctggacttgacaccaagttgtggtttgggttcaggtctgttcaacatgtctctcatccttcttgggctagcaagctacctgggccatatgcttcttgtgcacataaacacaagcgggcaaccccaaccagtcaaagacattctaagcctctacttttgtcatgcccgcttacattccattttccaaagcaggttatgtggccaaatccgaatccccaggccagggaagtactgttttcccagctcttgttcactctgctttatctacattagacttcttgctgtgcttgaggaagccagtcacactctcctctcagagtctttgcatttgccaatccttctgtctggagcacttttccctcaaatacttgtgcaactcataccctccagttcttaaagcttttgctcaactgcatctcatcaatgaggacttccaagactccactttctgatgactctcattgtcccttgctagccctctcctcagagtgttcatcaccactcaagatacctatatagtttacttatttacttgttaagcctgtgtgcctccttatgaatgcgagtttcacagagagagtgtgtgggtggggtttgtttgcttattgctatatcttcagtgaacaatatgccaggcactgttcaaccatttgaacagtgcctggcatatatagttggattttaataaatatttgaataaataaatgaatcttactgtttttaaacttttgtggtttttaaaaggcattttaaaaatctgggttagtatcaaatattacaatggtattactttaacttcaggtttcatttagctgttttaacttttacaatatattctgacacagaaaatattaggcattaagcatttttcaatgagttgattcacttctactcatgcacatatgtgatgtctgatttcgattcttaaaaagagatgagcctgggcgtggtggctcacgcctgtaatcccagcactttgggaggccgaggcaggtggatcacgaggtcaggagattgagactattctggctaacacggtgaaaccctgtctctactaaaaaatataaaaaattagccaggcgtggtggcacgcgcctgtagtcccagctactcaggaggctgaggcaggagaatcacttgaacccggaaggcagaggttgcagctagccgagattccaccactgcactccagcctgggtgacagagcaagactccatctcaaaaaaaaagaaaaagagaaaaaaagcaatgcattaaaaccatcttgagaaatcatgaaaatatggagaaaagaagaaaacaagattatactctacttgtttttatactacctagaatgtaataggcactcaaaaaaatgtctgaatggatacaattatcactgccttaaaagttttccattaaagcaaagaagccaattttacatttgtattatacttggacactcatattaaagactcacagagagtttatctggaaaaataaacttggctgacatcattaggtttatactttataatttgatctttgaaataattcaggaacaggaatgccagtcacttcattgaactgtacctgaattttaacacagtacaattgagttcctagagctccaatatgatgtaattaaactgtcagaaatattaacatcgatgttcatgagcgtcgttcatgatgttctcttggttctgatttattcagtgaggcatactgtcactgaagtggacttactgccattaaaaatgcctcatgtttcccagttccgcaaaaatttgcatcagtaatgaaacagagagatgtaatcagccctgcagttgtcaggatcttgatcctcttggtagtatttcattcatttcatcttcaccagataatggtagtttaaaaccgcaagaaaaatgaaactaaaaatagtgaatttcacttctttttctaaaggcataaacttaagcaaatagtgcatgtgtgtgaggggggaggaagagagagagaaagaggagagagagagtttgtaactattccttttctgctttgtgaccttaattcttcagcacccatttcctgtacttaatattgcaaagaggtttcctgtggtatgttaccaggagactcatgtagtctgaggctttttatctaccttacgttcttatccctccattctaataaaaatatgaagcctcacatccacctagaatatgattttgtcttaatggttagcattggcaatgattcttttagcttctgctgttaaaaaaaaaaaaaggaataaatgcaggattctaatcaaacatgaaaatccaagtggcatagaccaaagggaatgagaagcatatttaagtcatttagtcactggcttccgaagcagttccaagtcagatgtaaacctgaggttgtccctaattaagttcattatggttgacttgctaaagcaaggtcttgttttagatggaagtgacaatgtgcaaaacaaacagagcttgaatagaagttattttcactattggaagattgtatattatgaaaagttagtttcaaaggacctttaaagtttaattttgtttgcacctaagaaatttccctttaacttgcaaatgctgtttgaagtgtatttctttaacacatgaacaaacaatacagacacagattcacaaaatctacaaggagatttccattcccagtgaatatcatccatccataggtttctttgcttccagatcatcattctctcctcacataaacagtcaaaatgtttgtaatgtcttctttataaaacccaaaacataattatgataaagtagtcccaagtaacagaggaaaggaccataactctccaatatatgccatatctacagtttttagaatattcatatttcattacctatataggatatatactatttttatttctattacattggagtttaaaggtacttgagtttcgtttgtatttttggttaaatgtcaaaacaaagagtgaaaaaaagacctcagtgtctcaactcccttcttaccttcatgaagtgactgcaaagtgttcaattcttactcttttgtgttgaggagacagcactgcaagtgtgcagtaatacttattttattacatagaacaaagtttcacatttgtgaatggggcacaaaagagagcttgtcagttttacctttttcaattgactttttcttttattctttttaacttttaaatttattttttgtttttttgtttttttgtttttaaatagagacagggtctcactatgttgcccaagctgctctcaaattcctggcagcaaacaatcctcccacctcggcttcccaaagggctgggattacaggcatgagcgaccgcacccagcctgttttttactgtagtataatatttgtacatatttatggagtgcatttgatattttgttgcatacacagaatgtgttaatgatcaagtcagggtatttagagtattcattatctcatgtatttatcatttctatgtgcggggcacatttcaagtaactagtcaacttttaaaaagatacgcagtaggctgggcgtgttggctcacgcctgtaatcccagcactttgggaggctgaggtgggcagatcatgaggtcaggagttcgagaccagcctggccaatatggtgaaaccctgtctctactaaaaatacaaaaattagctggacgtgttggcgcatgcctgtagtcccagctactcgggaggctgaggcagaagaatcgtttgaacctgggaggcggaggttgcagtgagccaagatcgtgccactgcactccagcctgggtgacagagcaagactccatctcaaaaaaaaaaaaaaaaaaagatatacagtttttttttctccaagggtaatgatatagataaactactgtatggatttcttcttccctttaaagaattacttcctcattattaagcttgagggttttctttgttatttatgagcaagtgaaatgaatttataatggtgttaaaaatgtaatcatggccctttaatatctgttttctataaatgtaattttccattatttgtttttgcttttattaaggtgaggaagatcttctcagtcctccccaggacacaagcacagggttagaggaggtgatggagcaactcaacaactccttccctagttcaagaggtaagctccaatacctagaagggactcagatttgctgggatcaggccactcgcttccctacccaactggtgtgtgtattttccatatggaagccaacacgcagtatcagaatggcaatttgggtccatggtgaaaagatttgatttttaagtgtgaatttgtggtttagagtactctgaattcaaatacccgtgagggcaacatgtttccaaaaataagaataccaccctctatttgtcaagtattttacttgcttcacacattagtctgaagagttaattatgaggtgccctttactgaagagcaattattatgtgacttttacagatgaggaaattaatgccctgatagtgcctttgccagggacatatggctactacgtgctacagcaaggcctagaacaatgcctactgattggtagtggtagagattctgacttgccatctgatgccctttatatttaaaaattgtatcttactccatcatttaaatatagggacaattaaatcttcatagagtagttggttattttttacttcgatagaggaaatacaggcttagcaaagaaagacattaatatttttctttttcttcatcactttggccttgcgtattttacccccatacaaaaacagcattttaccctgcagaattttcccactggcttgcatgagcttcagatgtcttgcttcatccaagatgatgttttgctgctactgttcgtttctgggggcatttatttggtttattgccctcacataaaacaaagtcactctctcgccttccttcaacgaataaaaaggatggtggcagtcacctgtgatcaaatagaagaaaagcctagagaaacaaaagggagaaaacacaaggctttgtggccagtgattggcacctctaatgggtagcctgggagggacgggcagcaggaaatctgggctgtttgttcctctccataagggcaatgaggagggtgtattgagtagtgtgtttttcctatctttttgttcagtgtcagttaacaatggccatttcctagctatttgatgtgcaagtaaacgttgtgcagtgcacattaaaagcaataatgttctggtagagcgttgctaaggaaccgtcaggggaagctaattttaaatgtctgcaccagccatcttttcactgctgagcgccactgaagtgatgattttaacagataaaaatcttatctgtcttccacccacctccacatcccccaccgccacccgcatccccattctgactatcttaggtatctccttcttctagatgtcataattcataatgagaagatcatacacaggcttgacagaatcaggtgctttcacgtgtctcctcattactttgtcctgcttgcttttactagcacctactacgtaccagtggaggtagtagggatggaaagaagaaatgacaaattccttgccttcaaggtacttatggtcaattgcagatacagaactccaaagaaattcaaatcacagtacaatcattgattactgtatgatcctggccccttgaactggcagcttgcttacctgctctggaaagttgctggctgccctgttggcaccctgggcatttcttccacatctaaacaagaggttagtagagaagaagctacagcaaggctcatgactctgcttcttcataggcagccttgacttcctagactcctttttgtacctgagtttctggtccaccctaattagctgtaaggtgaaatcctttgcaccatctccctgtgtcccgcttttagagtccttaaagctagataccacatgggtgtagaagcttcctggaagacaagaaatatacctcctctgatatggtatttagcagtcagtatctctgatgttgatttacttacttgtatggaaacttgggaaactcaattcaggccacctggatagtgtttactaaattagtgcttacggaagaatttcaggccttaagggctgatttaagttctcaaatgtgggagaaggaagccttgtccgataccaattccattaacttaagttccggcttactcagtggtacccttgtggcctgagaaaataaattcacattcttaaaaaacaaaacaattaaatacacaaaaaacacaagagagtagctaaggtattggaaaatctggcctatcattctgtaataccatgatcttggcatttcctcacgttttgctactttcagctaactcaggctttcttacaggcctttttctccccaaattcaagtggataaaaagtttcattattgtaaaaattaggctaattattgatgcactcaaaaaagtggtttttggatgctttctttccaactaaaagcacttttgttttttaattttgaaaaatggcatatgtgtgtgtacacacacatataccgtcaagtttggcgggaacatcttaccagttggtagatgtgttcagctgatattaagcagaaattcttgagaatcttaacatcttgggattacaaagtctttcaaatggaagagccttgaaaggtcattttaacacttttgacatccaggacagtgatttctgactctgttttgatggttatccatatcagaggaacattttacatcacaaactggggtaaagatataaaataaattgtacatgtgtttatgtacacacatgtatatatacacccaccatatgtacacacacacatttacagtgtcatatgcatacaaagatcagaaacaaaagtttcatcaagtgatgccttccatactacatacagtgcatgctgtttttctattttatttatttaaaaacaaaatgctggttgcaacccactaaatggattttctgaaccagtggtttaaaaatactaatctatgtgatctcagtttttcttgcctggttgaattatctttcaaaaaaatttaaattttgagatttttgccgtggaagtttctgccaagacgttgctaatgtctcagagacctttatagttttattctaacactaccatccatgttctcattgttgtgttacaaaaaacaaagttcatgattgctacagctgttttggacagctgtttgagtaactcaaaacagatgtgagagccagaggtctgacatttagtggaaatgtgctattaaataccaccgcgtggtttacttaaccctgctagataattgcccacagaggaaaagccgtttttaaaaaacttatgctcttcataaacataaagtatatagataggtaagctattatgtacctcaaatttacaacttttctgttgccccttgccacagagttggtcctgaaggtgtcagctaacctttctttatcttttattttcacaaagagtacctggaagccaagaaaagtcaagtgccttatttatggccattcagcaggttaagttaggcttctaatcttatcttaatggctttgctaaactgttatcaaaattaataaatgagtggcatgcttctccatttagtgataaaccgatggccaacactatcctgcataataggcaatataagcaggagcatattcaagatatgaatgtgtaaacattcagctttgtgattatatctttctggttggtctctagatatacttagttgttcacaaacacttgggagatttgagtggctcagtgtatatttgaacactgaatattagccaatttctatctaatctgtctatctctaatctcttcctttgtaagtatatgtgtagaaattgaattatagtgtaataagtcattatctactttactataaggtactctctaaagctctgccattctataggaaaactacatgggtacaataaacaaacgtaatttaaaaaataaccccattaagtgatttgtccataagtctctgatcatttagcagactaacaaagatatttttatatgtatgtgcattgatgaaagaaacgctctcctagtcagtagtatggtattaggctctctaaaatgtggtaccactttatatagatgaatgaataataggagccaagataagctcttaatgcagtaaaacaatccagaaagcagttagcagtgctactatttctgctacctgtacaatctcttgcctactgacctgtgccacattatctccaccagcccatgccatcctctttttttcataccatcccctctcaaataagcccgcgtacattctatcaaatacccctaaattaccaacccaacagctttgtaaaacctaccgtcttttaaaattaaaatcttattctgtggttcttttatggaagagcaacataaagaacaaaggcagatagaaatatggtgtgccctttttcaggcaccattctgtttcctgtatgctcccacaaaggatttgagcggttatccctttaatccaggactagcaaactacatacagcccaaatgccaaatctggcccaatacctgtttttataaagctttattggaacacagccatacccattcatttacatgttgcctatagttgctttctcattaccagggcagagtagttgcagcagtgctgaatagctggtccagagaccgtgggcttgcaaagcctgaaatatttactatctggccctttatggggaaaatttgccaatccctgctttacgctattatttcgttgtccattctgactcattacatgtatagagtcacaggcttctgtgctgatcaactttcagctgaacaagattattgagctgaaattgaattgatttatagatttatattcatattcaccaaagagcctgcaagtgtggccatttgaatttttttgacttataaaataacagaaatcctaaaaagggacttattcttccttaagtattttaaatagtcagtgaattaatataaaagaggctaaaagcacccagaaacagtactgtcctgcaattccaactctaaaataatgaattacaatcaataatgtcaattttatagtgcccgaggaaattagacttctcgggacctgaccaagccctttatttagactcaggactgccccagcacacttcccttttgtcttgattcatttcctgacaacacatcacattgccagatggacactgtaactgaaggtctacagaaactcatttccaaaaaaaaataaatgtttagaaaatgaaacatatctgaaactttatttatcggtcaagaacttttaaaaatgttgtaatcaagtagcctctgttttgtcagcgtagaactagtccttttacagtagaaaatatcatttgtttttaactttttctaaagtgaaaaaaaggaccttccttttgtaatgtgttaatgagtacgtggggacccaagtgatgagggaggattttagaagagattagagttagcttggctctgggaggtccattttcataaaatatggtttctgaagaaggatctggaacataacacaagtcatttgctgctacatattaagaaataatcaattgataactgagttctgaatatggcttagtgtagaattactaaagatatgtatcattaagcattcaaagaatcatcgttacattctgaagtacataaccataattacattctaaatcacatggctttctaacaacactgtccttcctaaagatctcaagttttcaaaactagaccaaagttacatgccgaaacaagttacccacctttggcatccaaactaaagtgtgccagtgaagggcaagttacttataacacagaaggactcctcttggtcatgacccaactactactttaccaattcacttcagccagtatttatcaaataccaaaagtgtgtatatacggtacagggcattgggcatagagaggtggatgagcaacatgtggaccccgtcctcaagaggcttatagtcttacaggggaagggaattaattctgccaccagacagtattatgaaacataaagatacttttttaaaaaaaccttgctaaaggaatcaaaaagaaggggtgagtgattcatactgggatttcagccatcaaggaaagaatgatgttctcctccccaaatgatgggaacatcatttggtatggatctcccactagtgacacccacagctgaggagctagtacccatttttctccctcttttccctggcttgaggagcatcttaaatacctggcccttacgtggtcaagctgaaaatctgatactcctaagaaatcgctgagtcatgtaggaaattcagaaggaagagaggaagggagagaaggagaaagggagggaagaaagagaaggagagagggaagaaaaacttagaaactatccttaaatgtatactagaagttttgaaccctaaccttgagtgagttttgaaaggtttctattggtgtcgtagctccatacctcttcattccagactagtagttctcaaattgtttcagggagtttttagtcttcttggagccactgagaatgatgggtggaggggaaagggagatgctgtacaggatctctcacagctctgctttgaactgctcaaaatattggaattccatataagattgttttaggagatgtcccattgctatagttaaaacagtttgaaaaccaagattttaaaggaaattgcatgcccaagacaggctattgacatgtatggacagaagtccctacttttctgtccaattatgacttatcatagaacactttctcatcagagtctacttttgaaatacaaataaatgcatacagatgtaggaatctatgaatcaaggccagtgggtctttagccattgcctcgtaaggctcctgatatttgctgaattggggaggaagtggaaagctcattcctggatctggctctgtggcttgcccattactgggacttacctcttcccctcatctgttctttctgttttctcaaatgcctccaatttcatcatggaaatgctcagcttctatcagatagaacaaattctcccaagaggatggagtccagcctctatgtcgggttctaccttgcatttgatgtgcagactttgggcacacagagtcaactactgtttatgtttcaatgtgctgattgtcaagagtgaagagattctgagactttttttaacattaagtttgagttgtccttgaaaacaatgcccaatttgtcagatttctattctgtgccagttttcatccagtttaatgcgtgaactctatggattttacaaatgacgtcttctggatcatgttatctgtttacactgatcttaagtgtatgtaaaggttatttgactagatgtgtcttttgggttttttgtttctgtttttttttttttttttttttccagcagagaataaatggtcatctcaacatttgtttggtaaaagaagcaaattggtatgaaattgtatatttatgcatgttttttttccctttctgatatctctgcctcttcctctctctattattaaaggaagaaatacccctggaaagccaatgagagaggttagtgagattcaggctcacggccatggcttctgtctgtctcatcctgctttttatgtttggcgtttgtgtaagaattgtgtgtgtgcacgcgcatgtgtgtattacacattgtgtcatcatgtaaggatggtagtcacctctccacttgcagctcatgaggaacattcctcaaatgttcattgccgttgtcatcaccatgacgacaagactggggttgggagcaagaatctctttaaaatggcaatcctttgtagtccctaggttggaatcctgccgttcatcatctgttgccatttgcaacactaacaaaatcttcaaaataaatttagccttgaacataactgatgagtcataaagctttcttccacttccaggaccttagcattttctgccagcgcccttagtttttattcttctgggatgacttcattttgcttttgtttccttttttcttggttcctacgctctttctctcccattttagcgaacattttttgagcacttactgtgtgccaagcattgttctcagcacttgccatctttttcatcatgtcatcttcatgacaaacctgtgaggtaggtactcttattaaccccgttttacagataaggagactgagtcaatgagagagtaagcagtgtgtcccaggtgacagagccaaggatttggatccaggcagtctggctccagacccacactcttaactctcatttgaaaggcttacatcatctcaacgtacccttcagaagatgatcttttttatttggtatttgaagccacacagaacaataaccaattcgattaaaaaattaaatattggagttttgagaggtttttaaaatgcctatttatgggttgaaagggatagggtgcagtcttatcactgaatgtggtttcaggttttacggtgaaagatgcttcttactcctattccaccaggaatattgtctgaatatcgaattacctaattaagtgactgttggatgacaaagtgttaactgacagcccaagtaaaatcaaggttgtctttaccaagaatttaatctgaaggaggagagaaggaaagctctcccatgggatgacagtgttctgggagacaggctggatgggtggagagtccttcttaaatgagaagattctggattccttagcaacaggatggactggagagaccactgattcatttaaacacaggagtcgtaatgaaaactctgccaacatcatgccatacaagtctaatcaatttaatgattcttcagtgtgtctgtgccagtgcctccttccaaggctttgggcagtggggccagggagggaatggtaggctgggaggagaaattgaggaaacctgacttggtgaagcattgaatgcccctgacggtttgcctggttcatgtacttcgtatgtgagacttcttgggttcattcttatggtaagtgccccttaaaatttattcattttaactttttgtagaaaaatgcaccataattttgaccaccttaaacatgtttcactcacaaatgaatttcagaaaaggctagcacatgtaattgaagttatataggcatttgcagacttgactacctgaggtgtatggtgttcagacaagtttccagaagccaaagaatcaaaacaataatgaccttttttaatgctatgaaaatatcccaaatgtacgtaaagcagatttttttcagagattaaattatagagaagaaaagataagcaaatttccctgtagtattccggctttcctttggacaactgaatgctaacaatttatttgggaattgtatttttaaaaaatagagcaccagattgctattgaggtcttggatctttgccagaaagtctcaattccaatcgctgtggaaaacaattccctcaggcagtggtgacgtgtgagactaaatgtgttgcagttagcgccaacttgaaaaacatacaactgccctaatgttcaaggcatagtgcctttgtgttcaataatccttaagaatggattaaatcaatactttctatagacatagttttctgtcaccttgtgcctgaaggtgattgcaaatgcctgaatcctggctgcttttcagtacctctcatacttcatagtatgagattgtaattttgactttagaaaaatctgtcaggtaacattaatgacctcccgaatgctctgccttacacacatggataatagaactaggatacaaatctactttctatagtcatgtcacagtgcagtcttacccctccaacggattaaagtatgattctttagggcagtagtttgtaaaaagagattgacttcttttttctggatctaatgaaaaactccatggaaagaaattagaattatttattctggtaaagcaggtatttagtgaagtaaccaaaggcataatatagatgatgaggtgactctaaaagttctttatttttatagcacaaagatggccacaaggtcatttgtgaaaatgcagcagtgtaaaccggttaaaggccacccaactttttgtcggagtgtgcatggcacattaagaataatgaacctgttttccctggcaaatctttaaatagcagatacccctagaacttatgcttcttgagagactcaagaattttccttccagttagtaactgaacaccatttcaaggaagagaagcaccacttggctatataatccataaatgcatttatttgttttattatattttgaactgccatctacatcccctagcacacagcctaaaaagaaagacactttgtgattatcgataagctgacaggaaaaaaaatgagttttctccccttttcgttgatgttttgtaatatgttttctagctactaggtggactacatactatagtcacatgtgggccatgagaaatacttcgaattacattcaggcaccatgttgtaaaggtcctggactttgtttttactgattttgttaaccgtaaagatcgctagtaattaaaaattggcagttagtccatctatcttcaatttatgcatgaataattatgcagatttcccagggttgctggacagccaaaaatagatacaggggaagccctccaacttgatagcagcagttatatatttgtactctgagctctaaggagcagcaaaggccccactgtgtcgtcttcctgtggtttttatggcacagaaagccaaaaatgatttcagttcttcactgagggctgccaaactattggcccactttatgaatagttgcatatgctttgttaaaaaatttttatacttgcagtctcagccaaaatccaaagtgattttctaaaatataattaatactccatgaaattctttgcactaataaagcacaaaaagatagatatacaaacttggtcaccttaatagaaatgcctgaatgacattaaacttttaataagtaagtcttcagttgatctggtgccatcactgtttaagtgcctgcccgtgaatccgcttcattttgtagagaagctatatctcttgaaataaatattaaaacaaaatactctccctagtctatagctttaatttttattgggatatctttaatttttattggtatttttaacaattattatgggaatctgtaaagttgatacatggcaaggtagtaatagcctagtaaagcatttcagttccaaagacaatacttgaatagtggaaggatttaccaatgtgcaataattaaaattagccatgtaaaactatgggacatagacgaaaaggcaagccataaagtaagtctcagattatcttactctaaatctgaattttgctacgaagtacccagggacattgtgctgttctttttctccgtgctgggagattcgtgctaggtcgtgctgcattattagtaaaaggctattgtgatagttaaccctcatttaggaggagctctaagatggattcacaaaatacccaaatgcatacaatacatgtgggtcaccttataattagggtctagagtaatttggaatgtaaagcaatttttattctgaggtttcctaattcaaatgttaatagtgcaccaaaaggtcaattcaagagtttattattattatttttcaacccaagtaaaagcagagagaaaatagccacctccaccatagcctcagaagcaagccaacagcctgaaacagctttgaaatgaaaagttggtgtggcggtgatggtggcagtgataatggtgacgatggttgggtgctggtgatggtagtggtagttgtgaaggtggtgatggtggtttgattgatagtaaaaaaaatgttcgttaatacaagtagagagtaagtaatcaatcaatcactcatagccaaggtggaaaagatgtatcccatcatggaatattcctgttctgatagaaatcttgtgcttatctatggaattcttttgatatatatttacattgggaacctgaatgtagcttgacatttttccatgtaaacaccagtagcctgatccaacattaagctgatactaacaaacaacgtgtaatggcttcattaataaggctttgcttcttcctggaaactggtgaaaaatcaaaccttgttgtgtacaccctcgatgcagcttctgtgttgtcttcacccagaaatggggaatgatttcccaaatggcaaagaaacagagtgatgctatctatctgcaccttttgtaaagtctgtctttctttctctttgttttccaggacacaatgtaggaagtcttttccacatggcagatgatttgggcagagcgatggagtccttagtatcagtcatgacagatgaagaaggagcagaataaatgttttacaactcctgattcccgcatggtttttataatattcatacaacaaagaggattagacagtaagagtttacaagaaataaatctatatttttgtgaagggtagtggtattatactgtagatttcagtagtttctaagtctgttattgttttgttaacaatggcaggttttacacgtctatgcaattgtacaaaaaagttataagaaaactacatgtaaaatcttgatagctaaataacttgccatttctttatatggaacgcattttgggttgtttaaaaatttataacagttataaagaaagattgtaaactaaagtgtgctttataaaaaaaagttgtttataaaaacccctaaaaacaaaacaaacacacacacacacacatacacacacacacacaaaactttgaggcagcgcattgttttgcatccttttggcgtgatatccatatgaaattcatggctttttctttttttgcatattaaagataagacttcctctaccaccacaccaaatgactactacacactgctcatttgagaactgtcagctgagtggggcaggcttgagttttcatttcatatatctatatgtctataagtatataaatactatagttatatagataaagagatacgaatttctatagactgactttttccattttttaaatgttcatgtcacatcctaatagaaagaaattacttctagtcagtcatccaggcttacctgcttggtctagaatggatttttcccggagccggaagccaggaggaaactacaccacactaaaacattgtctacagctccagatgtttctcattttaaacaactttccactgacaacgaaagtaaagtaaagtattggatttttttaaagggaacatgtgaatgaatacacaggacttattatatcagagtgagtaatcggttggttggttgattgattgattgattgatacattcagcttcctgctgctagcaatgccacgatttagatttaatgatgcttcagtggaaatcaatcagaaggtattctgaccttgtgaacatcagaaggtattttttaactcccaagcagtagcaggacgatgatagggctggagggctatggattcccagcccatccctgtgaaggagtaggccactctttaagtgaaggattggatgattgttcataatacataaagttctctgtaattacaactaaattattatgccctcttctcacagtcaaaaggaactgggtggtttggtttttgttgcttttttagatttattgtcccatgtgggatgagtttttaaatgccacaagacataatttaaaataaataaactttgggaaaaggtgtaaaacagtagccccatcacatttgtgatactgacaggtatcaacccagaagcccatgaactgtgtttccatcctttgcatttctctgcgagtagttccacacaggtttgtaagtaagtaagaaagaaggcaaattgattcaaatgttacaaaaaaacccttcttggtggattagacaggttaaatatataaacaaacaaacaaaaattgctcaaaaaagaggagaaaagctcaagaggaaaagctaaggactggtaggaaaaagctttactctttcatgccattttatttctttttgatttttaaatcattcattcaatagataccaccgtgtgacctataattttgcaaatctgttacctctgacatcaagtgtaattagcttttggagagtgggctgacatcaagtgtaattagcttttggagagtgggttttgtccattattaataattaattaattaacatcaaacacggcttctcatgctatttctacctcactttggttttggggtgttcctgataattgtgcacacctgagttcacagcttcaccacttgtccattgcgttattttctttttcctttataattctttctttttccttcataattttcaaaagaaaacccaaagctctaaggtaacaaattaccaaattacatgaagatttggtttttgtcttgcatttttttcctttatgtgacgctggaccttttctttacccaaggatttttaaaactcagatttaaaacaaggggttactttacatcctactaagaagtttaagtaagtaagtttcattctaaaatcagaggtaaatagagtgcataaataattttgttttaatctttttgtttttcttttagacacattagctctggagtgagtctgtcataatatttgaacaaaaattgagagctttattgctgcattttaagcataattaatttggacattatttcgtgttgtgttctttataaccaccaagtattaaactgtaaatcataatgtaactgaagcataaacatcacatggcatgttttgtcattgttttcaggtactgagttcttacttgagtatcataatatattgtgttttaacaccaacactgtaacatttacgaattatttttttaaacttcagttttactgcattttcacaacatatcagacttcaccaaatatatgccttactattgtattatagtactgctttactgtgtatctcaataaagcacgcagttatgttacaaaaaagtattgactggactgcagtactttgtttttattttaatttagttgttgttacttacttacttactttttaaataggtaatacatgcatatgagtaaaaaactataatccagaaagacagtgaaaacactcctaactaccccttcccccatatcaatcaatcatcctcattgctctatgagtagacattattaatttcttatttagtcttccagagggtctttctttattaattattatataagcagttaaaataatatatatgttcctatttatttttttcctattattatttcataggatatagcattctctgcacccagttatgcaccttacttgtttgtttgtttaaatttaaatatggactcaagaaatcttttcatttaaatatataaaatgctttctcattcttttttatagctgtataatatttcattatatgttcataggatattttatttaagcagttccctttggtgggatatgtagtctgttgtcagtctttcttttgctataacaaacaatattgcacatttctcattacatcatttcatttgtgcataaacaaacaaatctgtgggatacttcctagaagtgagattgctggatcaaagggggtaagcatttgtagactgggagatgatacattttgtgcagtgattgattgattgatagtcatagtgtttgtttgtttgttgtgttttttgttttaataatgacaagtatattaattaagtcagtttgcagttcatactttgcttctcaagagaatttcatatcacttctattcttaatgtcaccatctaagaggatgcatgagtgagtagtaagaaagagacacctaaaatgatgtctcacaactggttctggggaagaagaatcccttaccatagtcaaccaccaccatggggagaacctctcctttgcccctgccctgctctgtttcttgccctagctgcaaaggaagctgagaaagtgggtagcaatgtcagcacttcttagggagaggctatctatctttacctattcccaaggttcatggatggggtgggcggggttccccaacagtgttcagatactggtgagccaaaggaataacataagtccaccaggtgcagcctatcctagtgattttggaaataataggagatgagatgatccatctcattagaaatgatgtttgttagtagatgtggcatctctgctgtgaatcaatcacttgctaattttttgaaagtagggtgatgatgctgacctaagtgactaccacattgaaacacttcccttgacatccacacataccaagaaaaattttcatcctatttaaataaacaaatcatttatccttcccaccattacccgaacctacctttgtttgaaacacccagactggctgttttggtgacacttaaggaggtaactgaggaatcttcaatacttcaccacgtctaagacaactgtgtgtggatgactctgaggagggcatttggttttccattccatacttggcacacactagaagagacagaattaattcagttaaaaattaaaatgaatcgagctggcacagattatgcaccggcaagcaaaatgtgtgtttgtttgggagaaagcaccaagactaatggatgtgttctgtagagctgcgatgggatttccctgaatttgtaatgctctaatggtggaatgaatacaaaggcaggcactggcgcacttgcaaagactttgccttcaaattaagtgtaggaaggacacaaatcaaattctttcccacagtagcaaagccattggagtaggaactataaatatgttcttcaatgccccttgcacgtcagtgtactgtgatctcatggacttagctgacaacacaagagtggcagcatgcccaacattccataataaacaatattgtgtgaatgtgtaaagtttggggatgtttgtttgagagtagcttttgtgtacagaaaaggttacctacagtaacttgaggtttaaatgttatatgtacatatgtgtgtatgtacatgtgtgtattttatatacattcaggattttagctcttccataactttattttgaaataattcaaacaagaaaaactgaaacaaaagaaaaattgcaagaacagtacaaagaaagaacccacatataccctttacccaggttaatgaattgtttacattttgcttcatttactttatcgttctctcaatgaatagatgatagtttttcctgaaccattttaagaataagttgtagacatcatgcctccttacatttaaatacatcatgtacatttcctaatatctaggacagtctcttgtataaccatagtacaattatcaaaataaaaaaattatatatagctatcatctactccacagtccatattcaaccaaatattgtcaattgtgccaatgatgtctttcatcattatatatatttccctagtctggactctaattcatgatttcatgacatttagttgtcatatctctttaatcacctttgatccggaacagtgtctctgcctttctctgtcttcaaagaccttcacatttttaagagtacaagacagttactttgtaggatgtgcatcaatttgggtttgtctgatgtgttctcatggtttagattcagggtatgcatttttgtcaggaatactacacaaacaatgatgtgtcctcagcatgtgataccaggaggcatattcccattcttggtgctgttaacactgatcatttggtaaaggtggtgtctgccaggtttctccacttggtatacattttaaaacctaagttttcataaatctttaggttcaacttagaaatttcatttttagatatataaatgtagacaatttgtatgaagtaagaacagtcacttttagtgagcagacttagccacgttgagtagtctgaattttttcgttctaagctgtatttatacacttaatgtgctttattttcaagcctatctaatatctcacagggaagaccaacgccaaccaacagcacctccaccatacctaactcacatatatcgagacaaacatataaatatagtgaatctcaagtcctctgaaacattccaatagcatatactgtatgagctgagtccaactttttttattcattttgaaataataacatgtgtaaaattacacattttacattggaacctaagacatctctccaatttgctaatatgtcaaattgccaca

SEQ ID NO: 76 - RNA, 13764 nt, Homo sapiens
  source 1..13764: mol_type = mRNA
tcactgacacatagagtaacttctagttctccaagctctactcatgatgaaagagaagatgttcaaaagaaaacattcacaaaatgggtaaatgcacaattttctaagtttgggaagcagcatattgagaacctcttcagtgacctacaggatgggaggcgcctcctagacctcctcgaaggcctgacagggcaaaaactgccaaaagaaaaaggatccacaagagttcatgccctgaacaatgtcaacaaggcactgcgggttttgcagaacaataatgttgatttagtgaatattggaagtactgacatcgtagatggaaatcataaactgactcttggtttgatttggaatataatcctccactggcaggtcaaaaatgtaatgaaaaatatcatggctggattgcaacaaaccaacagtgaaaagattctcctgagctgggtccgacaatcaactcgtaattatccacaggttaatgtaatcaacttcaccaccagctggtctgatggcctggctttgaatgctctcatccatagtcataggccagacctatttgactggaatagtgtggtttgccagcagtcagccacacaacgactggaacatgcattcaacatcgccagatatcaattaggcatagagaaactactcgatcctgaagatgttgataccacctatccagataagaagtccatcttaatgtacatcacatcactcttccaagttttgcctcaacaagtgagcattgaagccatccaggaagtggaaatgttgccaaggccacctaaagtgactaaagaagaacattttcagttacatcatcaaatgcactattctcaacagatcacggtcagtctagcacagggatatgagagaacttcttcccctaagcctcgattcaagagctatgcctacacacaggctgcttatgtcaccacctctgaccctacacggagcccatttccttcacagcatttggaagctcctgaagacaagtcatttggcagttcattgatggagagtgaagtaaacctggaccgttatcaaacagctttagaagaagtattatcgtggcttctttctgctgaggacacattgcaagcacaaggagagatttctaatgatgtggaagtggtgaaagaccagtttcatactcatgaggggtacatgatggatttgacagcccatcagggccgggttggtaatattctacaattgggaagtaagctgattggaacaggaaaattatcagaagatgaagaaactgaagtacaagagcagatgaatctcctaaattcaagatgggaatgcctcagggtagctagcatggaaaaacaaagcaatttacatagagttttaatggatctccagaatcagaaactgaaagagttgaatgactggctaacaaaaacagaagaaagaacaaggaaaatggaggaagagcctcttggacctgatcttgaagacctaaaacgccaagtacaacaacataaggtgcttcaagaagatctagaacaagaacaagtcagggtcaattctctcactcacatggtggtggtagttgatgaatctagtggagatcacgcaactgctgctttggaagaacaacttaaggtattgggagatcgatgggcaaacatctgtagatggacagaagaccgctgggttcttttacaagacatccttctcaaatggcaacgtcttactgaagaacagtgcctttttagtgcatggctttcagaaaaagaagatgcagtgaacaagattcacacaactggctttaaagatcaaaatgaaatgttatcaagtcttcaaaaactggccgttttaaaagcggatctagaaaagaaaaagcaatccatgggcaaactgtattcactcaaacaagatcttctttcaacactgaagaataagtcagtgacccagaagacggaagcatggctggataactttgcccggtgttgggataatttagtccaaaaacttgaaaagagtacagcacagatttcacaggctgtcaccaccactcagccatcactaacacagacaactgtaatggaaacagtaactacggtgaccacaagggaacagatcctggtaaagcatgctcaagaggaacttccaccaccacctccccaaaagaagaggcagattactgtggattctgaaattaggaaaaggttggatgttgatataactgaacttcacagctggattactcgctcagaagctgtgttgcagagtcctgaatttgcaatctttcggaaggaaggcaacttctcagacttaaaagaaaaagtcaatgccatagagcgagaaaaagctgagaagttcagaaaactgcaagatgccagcagatcagctcaggccctggtggaacagatggtgaatgagggtgttaatgcagatagcatcaaacaagcctcagaacaactgaacagccggtggatcgaattctgccagttgctaagtgagagacttaactggctggagtatcagaacaacatcatcgctttctataatcagctacaacaattggagcagatgacaactactgctgaaaactggttgaaaatccaacccaccaccccatcagagccaacagcaattaaaagtcagttaaaaatttgtaaggatgaagtcaaccggctatcaggtcttcaacctcaaattgaacgattaaaaattcaaagcatagccctgaaagagaaaggacaaggacccatgttcctggatgcagactttgtggcctttacaaatcattttaagcaagtcttttctgatgtgcaggccagagagaaagagctacagacaatttttgacactttgccaccaatgcgctatcaggagaccatgagtgccatcaggacatgggtccagcagtcagaaaccaaactctccatacctcaacttagtgtcaccgactatgaaatcatggagcagagactcggggaattgcaggctttacaaagttctctgcaagagcaacaaagtggcctatactatctcagcaccactgtgaaagagatgtcgaagaaagcgccctctgaaattagccggaaatatcaatcagaatttgaagaaattgagggacgctggaagaagctctcctcccagctggttgagcattgtcaaaagctagaggagcaaatgaataaactccgaaaaattcagaatcacatacaaaccctgaagaaatggatggctgaagttgatgtttttctgaaggaggaatggcctgcccttggggattcagaaattctaaaaaagcagctgaaacagtgcagacttttagtcagtgatattcagacaattcagcccagtctaaacagtgtcaatgaaggtgggcagaagataaagaatgaagcagagccagagtttgcttcgagacttgagacagaactcaaagaacttaacactcagtgggatcacatgtgccaacaggtctatgccagaaaggaggccttgaagggaggtttggagaaaactgtaagcctccagaaagatctatcagagatgcacgaatggatgacacaagctgaagaagagtatcttgagagagattttgaatataaaactccagatgaattacagaaagcagttgaagagatgaagagagctaaagaagaggcccaacaaaaagaagcgaaagtgaaactccttactgagtctgtaaatagtgtcatagctcaagctccacctgtagcacaagaggccttaaaaaaggaacttgaaactctaaccaccaactaccagtggctctgcactaggctgaatgggaaatgcaagactttggaagaagtttgggcatgttggcatgagttattgtcatacttggagaaagcaaacaagtggctaaatgaagtagaatttaaacttaaaaccactgaaaacattcctggcggagctgaggaaatctctgaggtgctagattcacttgaaaatttgatgcgacattcagaggataacccaaatcagattcgcatattggcacagaccctaacagatggcggagtcatggatgagctaatcaatgaggaacttgagacatttaattctcgttggagggaactacatgaagaggctgtaaggaggcaaaagttgcttgaacagagcatccagtctgcccaggagactgaaaaatccttacacttaatccaggagtccctcacattcattgacaagcagttggcagcttatattgcagacaaggtggacgcagctcaaatgcctcaggaagcccagaaaatccaatctgatttgacaagtcatgagatcagtttagaagaaatgaagaaacataatcaggggaaggaggctgcccaaagagtcctgtctcagattgatgttgcacagaaaaaattacaagatgtctccatgaagtttcgattattccagaaaccagccaattttgagcagcgtctacaagaaagtaagatgattttagatgaagtgaagatgcacttgcctgcattggaaacaaagagtgtggaacaggaagtagtacagtcacagctaaatcattgtgtgaacttgtataaaagtctgagtgaagtgaagtctgaagtggaaatggtgataaagactggacgtcagattgtacagaaaaagcagacggaaaatcccaaagaacttgatgaaagagtaacagctttgaaattgcattataatgagctgggagcaaaggtaacagaaagaaagcaacagttggagaaatgcttgaaattgtcccgtaagatgcgaaaggaaatgaatgtcttgacagaatggctggcagctacagatatggaattgacaaagagatcagcagttgaaggaatgcctagtaatttggattctgaagttgcctggggaaaggctactcaaaaagagattgagaaacagaaggtgcacctgaagagtatcacagaggtaggagaggccttgaaaacagttttgggcaagaaggagacgttggtggaagataaactcagtcttctgaatagtaactggatagctgtcacctcccgagcagaagagtggttaaatcttttgttggaataccagaaacacatggaaacttttgaccagaatgtggaccacatcacaaagtggatcattcaggctgacacacttttggatgaatcagagaaaaagaaaccccagcaaaaagaagacgtgcttaagcgtttaaaggcagaactgaatgacatacgcccaaaggtggactctacacgtgaccaagcagcaaacttgatggcaaaccgcggtgaccactgcaggaaattagtagagccccaaatctcagagctcaaccatcgatttgcagccatttcacacagaattaagactggaaaggcctccattcctttgaaggaattggagcagtttaactcagatatacaaaaattgcttgaaccactggaggctgaaattcagcagggggtgaatctgaaagaggaagacttcaataaagatatgaatgaagacaatgagggtactgtaaaagaattgttgcaaagaggagacaacttacaacaaagaatcacagatgagagaaagcgagaggaaataaagataaaacagcagctgttacagacaaaacataatgctctcaaggatttgaggtctcaaagaagaaaaaaggctctagaaatttctcatcagtggtatcagtacaagaggcaggctgatgatctcctgaaatgcttggatgacattgaaaaaaaattagccagcctacctgagcccagagatgaaaggaaaataaaggaaattgatcgggaattgcagaagaagaaagaggagctgaatgcagtgcgtaggcaagctgagggcttgtctgaggatggggccgcaatggcagtggagccaactcagatccagctcagcaagcgctggcgggaaattgagagcaaatttgctcagtttcgaagactcaactttgcacaaattcacactgtccgtgaagaaacgatgatggtgatgactgaagacatgcctttggaaatttcttatgtgccttctacttatttgactgaaatcactcatgtctcacaagccctattagaagtggaacaacttctcaatgctcctgacctctgtgctaaggactttgaagatctctttaagcaagaggagtctctgaagaatataaaagatagtctacaacaaagctcaggtcggattgacattattcatagcaagaagacagcagcattgcaaagtgcaacgcctgtggaaagggtgaagctacaggaagctctctcccagcttgatttccaatgggaaaaagttaacaaaatgtacaaggaccgacaagggcgatttgacagatctgttgagaaatggcggcgttttcattatgatataaagatatttaatcagtggctaacagaagctgaacagtttctcagaaagacacaaattcctgagaattgggaacatgctaaatacaaatggtatcttaaggaactccaggatggcattgggcagcggcaaactgttgtcagaacattgaatgcaactggggaagaaataattcagcaatcctcaaaaacagatgccagtattctacaggaaaaattgggaagcctgaatctgcggtggcaggaggtctgcaaacagctgtcagacagaaaaaagaggctagaagaacaaaagaatatcttgtcagaatttcaaagagatttaaatgaatttgttttatggttggaggaagcagataacattgctagtatcccacttgaacctggaaaagagcagcaactaaaagaaaagcttgagcaagtcaagttactggtggaagagttgcccctgcgccagggaattctcaaacaattaaatgaaactggaggacccgtgcttgtaagtgctcccataagcccagaagagcaagataaacttgaaaataagctcaagcagacaaatctccagtggataaaggtttccagagctttacctgagaaacaaggagaaattgaagctcaaataaaagaccttgggcagcttgaaaaaaagcttgaagaccttgaagagcagttaaatcatctgctgctgtggttatctcctattaggaatcagttggaaatttataaccaaccaaaccaagaaggaccatttgacgttcaggaaactgaaatagcagttcaagctaaacaaccggatgtggaagagattttgtctaaagggcagcatttgtacaaggaaaaaccagccactcagccagtgaagaggaagttagaagatctgagctctgagtggaaggcggtaaaccgtttacttcaagagctgagggcaaagcagcctgacctagctcctggactgaccactattggagcctctcctactcagactgttactctggtgacacaacctgtggttactaaggaaactgccatctccaaactagaaatgccatcttccttgatgttggaggtacctgctctggcagatttcaaccgggcttggacagaacttaccgactggctttctctgcttgatcaagttataaaatcacagagggtgatggtgggtgaccttgaggatatcaacgagatgatcatcaagcagaaggcaacaatgcaggatttggaacagaggcgtccccagttggaagaactcattaccgctgcccaaaatttgaaaaacaagaccagcaatcaagaggctagaacaatcattacggatcgaattgaaagaattcagaatcagtgggatgaagtacaagaacaccttcagaaccggaggcaacagttgaatgaaatgttaaaggattcaacacaatggctggaagctaaggaagaagctgagcaggtcttaggacaggccagagccaagcttgagtcatggaaggagggtccctatacagtagatgcaatccaaaagaaaatcacagaaaccaagcagttggccaaagacctccgccagtggcagacaaatgtagatgtggcaaatgacttggccctgaaacttctccgggattattctgcagatgataccagaaaagtccacatgataacagagaatatcaatgcctcttggagaagcattcataaaagggtgagtgagcgagaggctgctttggaagaaactcatagattactgcaacagttccccctggacctggaaaagtttcttgcctggcttacagaagctgaaacaactgccaatgtcctacaggatgctacccgtaaggaaaggctcctagaagactccaagggagtaaaagagctgatgaaacaatggcaagacctccaaggtgaaattgaagctcacacagatgtttatcacaacctggatgaaaacagccaaaaaatcctgagatccctggaaggttccgatgatgcagtcctgttacaaagacgtttggataacatgaacttcaagtggagtgaacttcggaaaaagtctctcaacattaggtcccatttggaagccagttctgaccagtggaagcgtctgcacctttctctgcaggaacttctggtgtggctacagctgaaagatgatgaattaagccggcaggcacctattggaggcgactttccagcagttcagaagcagaacgatgtacatagggccttcaagagggaattgaaaactaaagaacctgtaatcatgagtactcttgagactgtacgaatatttctgacagagcagcctttggaaggactagagaaactctaccaggagcccagagagctgcctcctgaggagagagcccagaatgtcactcggcttctacgaaagcaggctgaggaggtcaatactgagtgggaaaaattgaacctgcactccgctgactggcagagaaaaatagatgagacccttgaaagactccaggaacttcaagaggccacggatgagctggacctcaagctgcgccaagctgaggtgatcaagggatcctggcagcccgtgggcgatctcctcattgactctctccaagatcacctcgagaaagtcaaggcacttcgaggagaaattgcgcctctgaaagagaacgtgagccacgtcaatgaccttgctcgccagcttaccactttgggcattcagctctcaccgtataacctcagcactctggaagacctgaacaccagatggaagcttctgcaggtggccgtcgaggaccgagtcaggcagctgcatgaagcccacagggactttggtccagcatctcagcactttctttccacgtctgtccagggtccctgggagagagccatctcgccaaacaaagtgccctactatatcaaccacgagactcaaacaacttgctgggaccatcccaaaatgacagagctctaccagtctttagctgacctgaataatgtcagattctcagcttataggactgccatgaaactccgaagactgcagaaggccctttgcttggatctcttgagcctgtcagctgcatgtgatgccttggaccagcacaacctcaagcaaaatgaccagcccatggatatcctgcagattattaattgtttgaccactatttatgaccgcctggagcaagagcacaacaatttggtcaacgtccctctctgcgtggatatgtgtctgaactggctgctgaatgtttatgatacgggacgaacagggaggatccgtgtcctgtcttttaaaactggcatcatttccctgtgtaaagcacatttggaagacaagtacagataccttttcaagcaagtggcaagttcaacaggattttgtgaccagcgcaggctgggcctccttctgcatgattctatccaaattccaagacagttgggtgaagttgcatcctttgggggcagtaacattgagccaagtgtccggagctgcttccaatttgctaataataagccagagatcgaagcggccctcttcctagactggatgagactggaaccccagtccatggtgtggctgcccgtcctgcacagagtggctgctgcagaaactgccaagcatcaggccaaatgtaacatctgcaaagagtgtccaatcattggattcaggtacaggagtctaaagcactttaattatgacatctgccaaagctgctttttttctggtcgagttgcaaaaggccataaaatgcactatcccatggtggaatattgcactccgactacatcaggagaagatgttcgagactttgccaaggtactaaaaaacaaatttcgaaccaaaaggtattttgcgaagcatccccgaatgggctacctgccagtgcagactgtcttagagggggacaacatggaaactcccgttactctgatcaacttctggccagtagattctgcgcctgcctcgtcccctcagctttcacacgatgatactcattcacgcattgaacattatgctagcaggctagcagaaatggaaaacagcaatggatcttatctaaatgatagcatctctcctaatgagagcatagatgatgaacatttgttaatccagcattactgccaaagtttgaaccaggactcccccctgagccagcctcgtagtcctgcccagatcttgatttccttagagagtgaggaaagaggggagctagagagaatcctagcagatcttgaggaagaaaacaggaatctgcaagcagaatatgaccgtctaaagcagcagcacgaacataaaggcctgtccccactgccgtcccctcctgaaatgatgcccacctctccccagagtccccgggatgctgagctcattgctgaggccaagctactgcgtcaacacaaaggccgcctggaagccaggatgcaaatcctggaagaccacaataaacagctggagtcacagttacacaggctaaggcagctgctggagcaaccccaggcagaggccaaagtgaatggcacaacggtgtcctctccttctacctctctacagaggtccgacagcagtcagcctatgctgctccgagtggttggcagtcaaacttcggactccatgggtgaggaagatcttctcagtcctccccaggacacaagcacagggttagaggaggtgatggagcaactcaacaactccttccctagttcaagaggaagaaatacccctggaaagccaatgagagaggacacaatgtaggaagtcttttccacatggcagatgatttgggcagagcgatggagtccttagtatcagtcatgacagatgaagaaggagcagaataaatgttttacaactcctgattcccgcatggtttttataatattcatacaacaaagaggattagacagtaagagtttacaagaaataaatctatatttttgtgaagggtagtggtattatactgtagatttcagtagtttctaagtctgttattgttttgttaacaatggcaggttttacacgtctatgcaattgtacaaaaaagttataagaaaactacatgtaaaatcttgatagctaaataacttgccatttctttatatggaacgcattttgggttgtttaaaaatttataacagttataaagaaagattgtaaactaaagtgtgctttataaaaaaaagttgtttataaaaacccctaaaaacaaaacaaacacacacacacacacatacacacacacacacaaaactttgaggcagcgcattgttttgcatccttttggcgtgatatccatatgaaattcatggctttttctttttttgcatattaaagataagacttcctctaccaccacaccaaatgactactacacactgctcatttgagaactgtcagctgagtggggcaggcttgagttttcatttcatatatctatatgtctataagtatataaatactatagttatatagataaagagatacgaatttctatagactgactttttccattttttaaatgttcatgtcacatcctaatagaaagaaattacttctagtcagtcatccaggcttacctgcttggtctagaatggatttttcccggagccggaagccaggaggaaactacaccacactaaaacattgtctacagctccagatgtttctcattttaaacaactttccactgacaacgaaagtaaagtaaagtattggatttttttaaagggaacatgtgaatgaatacacaggacttattatatcagagtgagtaatcggttggttggttgattgattgattgattgatacattcagcttcctgctgctagcaatgccacgatttagatttaatgatgcttcagtggaaatcaatcagaaggtattctgaccttgtgaacatcagaaggtattttttaactcccaagcagtagcaggacgatgatagggctggagggctatggattcccagcccatccctgtgaaggagtaggccactctttaagtgaaggattggatgattgttcataatacataaagttctctgtaattacaactaaattattatgccctcttctcacagtcaaaaggaactgggtggtttggtttttgttgcttttttagatttattgtcccatgtgggatgagtttttaaatgccacaagacataatttaaaataaataaactttgggaaaaggtgtaagacagtagccccatcacatttgtgatactgacaggtatcaacccagaagcccatgaactgtgtttccatcctttgcatttctctgcgagtagttccacacaggtttgtaagtaagtaagaaagaaggcaaattgattcaaatgttacaaaaaaacccttcttggtggattagacaggttaaatatataaacaaacaaacaaaaattgctcaaaaaagaggagaaaagctcaagaggaaaagctaaggactggtaggaaaaagctttactctttcatgccattttatttctttttgatttttaaatcattcattcaatagataccaccgtgtgacctataattttgcaaatctgttacctctgacatcaagtgtaattagcttttggagagtgggctgacatcaagtgtaattagcttttggagagtgggttttgtccattattaataattaattaattaacatcaaacacggcttctcatgctatttctacctcactttggttttggggtgttcctgataattgtgcacacctgagttcacagcttcaccacttgtccattgcgttattttctttttcctttataattctttctttttccttcataattttcaaaagaaaacccaaagctctaaggtaacaaattaccaaattacatgaagatttggtttttgtcttgcatttttttcctttatgtgacgctggaccttttctttacccaaggatttttaaaactcagatttaaaacaaggggttactttacatcctactaagaagtttaagtaagtaagtttcattctaaaatcagaggtaaatagagtgcataaataattttgttttaatctttttgtttttcttttagacacattagctctggagtgagtctgtcataatatttgaacaaaaattgagagctttattgctgcattttaagcataattaatttggacattatttcgtgttgtgttctttataaccaccgagtattaaactgtaaatcataatgtaactgaagcataaacatcacatggcatgttttgtcattgttttcaggtactgagttcttacttgagtatcataatatattgtgttttaacaccaacactgtaacatttacgaattatttttttaaacttcagttttactgcattttcacaacatatcagacttcaccaaatatatgccttactattgtattatagtactgctttactgtgtatctcaataaagcacgcagttatgttac

SEQ ID NO: 77 - RNA, 6923 nt, Homo sapiens
  source 1..6923: mol_type = mRNA
gagaggggcagggggcggagctggagggggtggttcggcgtgggggccgttggctccagacaaataaacatggagtccatcttccacgagaaacaagaaggctcactttgtgctcaacattgcctgaataacttattgcaaggagaatattttagccctgtggaattatcctcaattgcacatcagctggatgaggaggagaggatgagaatggcagaaggaggagttactagtgaagattatcgcacgtttttacagcagccttctggaaatatggatgacagtggttttttctctattcaggttataagcaatgccttgaaagtttggggtttagaactaatcctgttcaacagtccagagtatcagaggctcaggatcgatcctataaatgaaagatcatttatatgcaattataaggaacactggtttacagttagaaaattaggaaaacagtggtttaacttgaattctctcttgacgggtccagaattaatatcagatacatatcttgcacttttcttggctcaattacaacaggaaggttattctatatttgtcgttaagggtgatctgccagattgcgaagctgaccaactcctgcagatgattagggtccaacagatgcatcgaccaaaacttattggagaagaattagcacaactaaaagagcaaagagtccataaaacagacctggaacgagtgttagaagcaaatgatggctcaggaatgttagacgaagatgaggaggatttgcagagggctctggcactaagtcgccaagaaattgacatggaagatgaggaagcagatctccgcagggctattcagctaagtatgcaaggtagttccagaaacatatctcaagatatgacacagacatcaggtacaaatcttacttcagaagagcttcggaagagacgagaagcctactttgaaaaacagcagcaaaagcagcaacagcagcagcagcagcagcagcagggggacctatcaggacagagttcacatccatgtgaaaggccagccaccagttcaggagcacttgggagtgatctaggtgatgctatgagtgaagaagacatgcttcaggcagctgtgaccatgtctttagaaactgtcagaaatgatttgaaaacagaaggaaaaaaataatacctttaaaaaataatttagatattcatactttccaacattatcctgtgtgattacagcatagggtccactttggtaatgtgtcaaagagatgaggaaataagacttttagcggtttgcaaacaaaatgatgggaaagtggaacaatgcgtcggttgtaggactaaataatgatcttccaaatattagccaaagaggcattcagcaattaaagacatttaaaatagttttctaaatgtttctttttcttttttgagtgtgcaatatgtaacatgtctaaagttagggcatttttcttggatctttttgcagactagctaattagctctcgcctcaggctttttccatatagtttgttttctttttctgtcttgtaggtaagttggctcacatcatgtaatagtggctttcatttcttattaaccaaattaacctttcaggaaagtatctctactttcctgatgttgataatagtaatggttctagaaggatgaacagttctcccttcaactgtataccgtgtgctccagtgttttcttgtgttgttttctctgatcacaacttttctgctacctggttttcattattttcccacaattcttttgaaagatggtaatcttttctgaggtttagcgttttaagccctacgatgggatcattatttcatgactggtgcgttcctaaactctgaaatcagccttgcacaagtacttgagaataaatgagcattttttaaaatgtgtgagcatgtgctttcccagatgctttatgaatgtcttttcacttatatcaaaaccttacagctttgttgcaaccccttcttcctgcgccttattttttcctttcttctccaattgagaaaactaggagaagcatagtatgcaggcaagtctccttctgttagaagactaaacatacgtacccaccatgaatgtatgatacatgaaatttggccttcaattttaatagcagttttattttattttttctcctatgactggagctttgtgttctctttacagttgagtcatggaatgtaggtgtctgcttcacatcttttagtaggtatagcttgtcaaagatggtgatctggaacatgaaaataatttactaatgaaaatatgtttaaatttatactgtgatttgacacttgcatcatgtttagatagcttaagaacaatggaagtcacagtacttagtggatctataaataagaaagtccatagttttgataaatattctctttaattgagatgtacagagagtttcttgctgggtcaataggatagtatcattttggtgaaaaccatgtctctgaaattgatgttttagtttcagtgttccctatccctcattctccatctccttttgaagctcttttgaatgttgaattgttcataagctaaaatccaagaaatttcagctgacaacttcgaaaattataatatggtatattgccctcctggtgtgtggctgcacacattttatcagggaaagttttttgatctaggatttattgctaactaactgaaaagagaagaaaaaatatcttttatttatgattataaaatagctttttcttcgatataacagattttttaagtcattattttgtgccaatcagttttctgaagtttcccttacacaaaaggatagctttattttaaaatctaaagtttcttttaatagttaaaaatgtttcagaagaattataaaactttaaaactgcaagggatgttggagtttagtactactccctcaagatttaaaaagctaaatattttaagactgaacatttatgttaattattaccagtgtgtttgtcatattttccatggatatttgttcattacctttttccattgaaaagttacattaaacttttcatacacttgaattgatgagctacctaatataaaaatgagaaaaccaatatgcattttaaagttttaactttagagtttataaagttcatatataccctagttaaagcacttaagaaaatatggcatgtttgacttttagttcctagagagtttttgtttttgtttttgtttttttttgagacggagtcttgctatgtctcccaggctggagggcagtggcatgatctcggctcactacaacttccacctcccgggttcaagcaattctcctgcctcagcctccagagtagctgggattacaggcgcccaccaccacacccggcagatttttgtatttttggtagagacgcggtttcatcatgtttggccaggctggtctcgaactcctgacctcaggtgatccgcctgccttggcctcccaaagtgttgggattacaggcatgagccactgcgcctggccagctagagagtttttaaagcagagctgagcacacactggatgcgtttgaatgtgtttgtgtagtttgttgtgaaattgttacatttagcaggcagatccagaagcactagtgaactgtcatcttggtggggttggcttaaatttaattgactgtttagattccatttcttaattgattggccagtatgaaaagatgccagtgcaagtaaccatagtatcaaaaaagttaaaaattattcaaagctatagtttatacatcaggtactgccatttactgtaaaccacctgcaagaaagtcaggaacaactaaattcacaagaactgtcctgctaagaagtgtattaaagatttccattttgttttactaattgggaacatcttaatgtttaatatttaaactattggtatcatttttctaatgtataatttgtattactgggatcaagtatgtacagtggtgatgctagtagaagtttaagccttggaaataccactttcatattttcagatgtcatggatttaatgagtaatttatgtttttaaaattcagaatagttaatctctgatctaaaaccatcaatctatgttttttacggtaatcatgtaaatatttcagtaatataaactgtttgaaaaggctgctgcaggtaaactctatactaggatcttggccaaataatttacaattcacagaatattttatttaaggtggtgctttttttttttgtccttaaaacttgatttttcttaactttattcatgatgccaaagtaaatgaggaaaaaaactcaaaaccagttgagtatcattgcagacaaaactaccagtagtccatattgtttaatattaagttgaataaaataaattttatttcagtcagagcctaaatcacattttgattgtctgaatttttgatactatttttaaaatcatgctagtggcggctgggcgtggtagctcacgcctgtaatcccagcattttgggaggccgaagtgggtggatcacgaggtcgggagttcgagaccagcttggccaaaatggtgaaaccccatctgtactaaaaactacaaaaattagctgggcgcggtggcaggtgcctgtaatcccagctacctgggagtctgaggcaggagaattgcttgaaccctggcgacagaggatgcagtgagccaagatggtgccactgtactccagactgggcgacagagtgagactctgtctcaaaaaaaaaaaaaaaatcatgctagtgccaagagctactaaattcttaaaaccggcccattggacctgtacagataaaaaatagattcagtgcataatcaaaatatgataattttaaaatcttaagtagaaaaataaatcttgatgttttaaattcttacgaggattcaatagttaatattgatgatctcccggctgggtgcagtggctcacgcctgtaatcccagcagttctggaggctgaggtgggcgaatcacttcaggccaggagttcaagaccagtctgggcaacatggtgaaacctcgtttctactaaaaatacaaaaattagccgggcgtggttgcacacacttgtaatcccagctactcaggaggctaagaatcgcatgagcctaggaggcagaggttgcagagtgccaagggctcaccactgcattccagcctgcccaacagagtgagacactgtttctgaaaaaaaaaaatatatatatatatatatatatgtgtgtatatatatatgtatatatatatgacttcctattaaaaactttatcccagtcgggggcagtggctcacgcctgtaatcccaacactttgggaggctgaggcaggtggatcacctgaagtccggagtttgagaccagcctggccaacatggtgaaaccccatctctactaaaaatacaaaacttaagccaggtatggtggcgggcacctgtaatcccagttacttgggaggctgaggcaggagaatcgtttaaacccaggaggtggaggttgcagtgagctgagatcgtgccattgcactctagcctgggcaacaagagtaaaactccatcttaaaggtttgtttgtttttttttaatccggaaacgaagaggcgttgggccgctattttctttttctttctttctttctttctttttttttttttctgagacggagtctagctctgctgcccaggctggagtacaatgacacgatgttggctcactgcaacctccacctcctgggttcaagcgattctcctgcctcagcctcccaagtacctgggattacaggcacctgccactacacctggcgaatatttgttttttttagtagagacgggcttttaccatgttaggctggtctcaaactcctgacctcaggtgatctgcctgccttggcctcccaaagtgctgggattacaggtgcaggccaccacacccggccttgggccactgttttcaaagtgaattgtttgttgtatcgagtccttaagtatggatatatatgtgaccctaattaagaactaccagattggatcaactaatcatgtcagcaatgtaaataactttatttttcatattcaaaataaaaactttcttttatttctggcccctttataaccagcatctttttgctttaaaaaatgacctggctttgtatttttttagtcttaaacataataaaaatatttttgttctaatttgctttcatgagtgaagattattgacatcgttggtaaattctagaattttgattttgttttttaatttgaagaaaatctttgctattattattttttccaagtggtctggcattttaagaattagtgctaataacgtaacttctaaatttgtcgtaattggcatgtttaatagcatatcaaaaaacattttaagcctgtggattcatagacaaagcaatgagaaacattagtaaaatataaatggatattcctgatgcatttaggaagctctcaattgtctcttgcatagttcaaggaatgttttctgaatttttttaatgctttttttttttttgaaagaggaaaacatacatttttaaatgtgattatctaatttttacaacactgggctattaggaataactttttaaaaattactgttctgtataaatatttgaaattcaagtacagaaaatatctgaaacaaaaagcattgttgtttggccatgatacaagtgcactgtggcagtgccgcttgctcaggacccagccctgcagcccttctgtgtgtgctccctcgttaagttcatttgctgttattacacacacaggccttcctgtctggtcgttagaaaagccgggcttccaaagcactgttgaacacaggattctgttgttagtgtggatgttcaatgagttgtattttaaatatcaaagattattaaataaagataatgtttgcttttcta

SEQ ID NO: 78 - DNA, 54000 bp, Homo sapiens
  source 1..54000: mol_type = genomic DNA
attaattcatttgaaagacatcaactacaatttaaaaaaacaaaacaaaaacagaaaaggtggtttgcaatttttttcacttcatgagactataatttatttccctgggtaggccacacaaatccttaagaacatggactttcccccatacaaggctgtgaaccgtgcacacagagatgctcgataaatggtaccgaatcctctccttcagcacctggtcctctctggcagtctccattctcttacctctcactgccccctctacttctctgaacctgcagtccccaaagtcaccaatggtctccatagcaacaaaatttagtgggctcttatacgaccttatattgcttgacttcttggcagcaactgacactgactaccccttgaagcatcccctgcccaggccttccacaatgtcacactctcttgcttctcctccctcctccttggttattgcttctcctatcctcacggctcagctctagccctcttctcaatcacttccttttccctaaaatgattttattcactcctatggtttcagttacttttttttttttttttttttgagacacagtttcactctgttgtccaggctggagtgcaatagcacgatcttggctcactgcaacctctacctcccggttcaagtgattctcctgcctcagcctcctgagtagctgggattataggcatgagccaccacgcccggctaatttttgtatttttgtagagatgaggtttcaccatgttggccagcctggtcttgaactcctggcctcaagagatctgcctgcctcagcctcccaaagtgctgggattacaggcatgcaccaccacaatggccttagctatctgttttttaatgacaattcctcattgagttcaaagcagcctcctgaacttcagactcggtatccaaccattactcaacataattactcaaatgtccatagatatttcaaattcagtatctccaaaatgtaaactctatcttattctcttcccaaaaccttgctgctcctcccatgtttctgctctcaataccactcctgccacagtggctgcccaggtcacaaacccagaagtcaccttcacatttctgtctcctaccttccccaatccctcattgtggtaggagttattaagaaattattttaggcagatagagaggaaaaggggtccttgaaaagtttttgtctcttttgaagcagctcctgagacgtttcctgtctagcataaaagccctgacttttagacccgagctggcaacgtttgatatgcaaatgccggcagttagaaactgggtccaccaacacggtgattcccaccatcgtcctcttgcccttgttctcacaagtgcctggcaacatggccacccccacatatccccacatgagtagaacatcatagcgccctgcatttgcatattaaaaggctagggtggaatggccagttttattagggggctacatgaatgacatgcgtggtcaaaccagtcccctgagccctatgcaaatcagacaccgcctcctgcatcctcctcctataactggctggtatctcccacgcactctgggtctcctctctcagctttggagcacccatccctctgtctctgtacaggggagctgcttctttctttcttctcccttccttcttgcttattaaactctccgctccttaaaaccactccacgtttgtccatgtcgttttatgtaattcgactcaagacgaaaaaggctagtattcctccactcggtatcatcaccacattctgttgagtctctttacgtccaaagaatctctcaaaatgggctatttccatctttaagacactctcttaaaccaccatcgtctctcccaagattccttcaacagcaactgcttttttctgcagccagtgatctttctaaaaggcaaacatgaccacatgtcttcttttaaaatatttatatagctccccacatcctttaaaaggtacactttggccaggtgcggtggctcacgcctgtaattccaggactttgggaggccaaggcaggtggatcacctgaggctgggggttcgagaccagcctggccaacatggtacaacctcttctctactaagaatacaaaaatagttggacttcgtggtgcacgcctgtaatcccagctgtttgggaggctgaggcaagagaatcacttgaacccaggaagcagaagttgcagtgagcggggagattgtgccactgcactccagcctgggggacagagagagggccgtctcaaaaaaaaaaaaaaaaaaagtacaccttaatctggtttcaaggtgcaagatctgcacctatccttccatttaagtttcatcaaaccgctgctacctccccgtctcccacacaatttatgggacttctaagttccctctaaagggtccgaacacctacactggtaacaagccacctggatttgaatcctggcaagacaacttactatctgaccttggacattgtgctgttcttaacctctccgtgcctcggtttcctcatgtgtatgaataacatcaacacctacatcaaagtttgctgtattaaatttgataatatatgcaaagcatttagaaaagtgcctagctcatagaaagccttatgtaaatattaactatcattttttttcttttttggggtggtgggggaggggtttcgcttttgttgcccaggctggcgtgcaatggcacgatctcggctcaccacaacctcggcctcccgggttcaagcgattctcctgcctcagcctcccgagtacctgggattacaggcatgcaccaccacgcccgggtaattttgtatttttagtggagacggggtttctccatgttggtcaggctgatctcaaactcccgacctcaggtgatccgcccgcctcggcctcccaaagtgctgggattacaagcgtgaagcacctcgcccggcctagctatcatttttatacaagtgctgggttttgggagaatgtaatgatggcttttttcttactaaactttcagtgcaggaggaggagaaagaaagtaaatagttatatgaacacagtagaaagtcaaagtggaaaacaaaaagaacatagaacccaggtgagcggtccagacctccccccagaaacctaagaatccatagaaatgggtgggaagcggagaagatcctccagacagcaggtggcgatgtagcatcccccagaaggcccgctaacagaagctaggaggacgcgctaccaaggtcacgtgtccccggcgttcactcgctcttcgcttcacgacactcgcatcctcacgggtgattggtctgcgtgcggcacgtgggcggggtaccggggcgggccggggaggggcggggtgggcggaggagaggggcagggggcggagctggagggggtggttcggcgtgggggccgttggctccagacaaataaacatggagtccatcttccacgagaaagtgagtgtccgcgttcggtggggagctgtctgccgcgcggtggcgggcgtggagcgcggcatcaccgcctctcggagggctgggtggggcccgagtcgcccccatgccgatctcgcccggcgaggggcgacgccgcagcctcccgcctcctcggctcgaggaggggagcatcacctacgcccctacttcccccgcggcccccgccctgggagccgggagggagtatgggcggggccgggggcgtctcgggacacgggagtggggtggcgcccagtgggtttgcttctgcctttctccgtcactttccatcgcttttcggaggattccttcacccctccccaatccttccctctccctagggtctagctagagtcatctctgggacacctccctcaacccctcctaccctaatcctggcagaattaacttttcctcctccggactgctcaattctatattggagtcttccctacacgtagatctttggggtcttgttcgtgtctttcccctgcactaggtccgcgagcctcccgagggaggagaccttggctcgcccactgtagggcctgacatttaggaagtgaagtaggaaacccggcgtgcccctaaacagggaagtcgtcacaagagtttttattacgggatgtttgggtttggtttcttttggtactcccatctttccggagcaggcggccagctttgtttttaggtattaggagtggactgggatgattttgttgtagtctgcctagcctgctgtccctttaactcttccgtgaccatgcacttgaagatactgtttgtgatatgtaaagaaactcctcgtttctctcatactattatccagccatttgtgtgtgagtgaagccttccccaggacagctttggcacatggtatcatgtttcataatagtttcgtgtttggaaagagttgctggtaaggctgttatttaataggaggagcaaagggtttttgttttattaaatacttataaatgatcatttatcccagacatttaaaattcacacacacacaacaaataaagcaaagacaaaagaatacatttaccaaatgtaaatctgtagcataaattttttttaatttttattttaaagatggggtctcattctgtcacccaggcaggtgtgcaatggagagatcatggctcactgcagccttgatctcctaggcacaagcgatcctcccgcctctgcctccagagtagctgggactacaggtgcatatcgccagggccaggtaatgtttttgggagagacggggtctcgctgtgttgcccaggctggtctcgaactcctggactcaggtgattctcccacctcggcctctcgaagtgctgtgattacaggcgtgagccactgtgcctggaacaaattgttaagtacaatgcttttcattgtagaaaacatctcggaaacttttgaaataggctgatgttcagtgggggaggaaggactcagtcgtatagttgtcactaattttttgacttgattgacatgactcgtaaatcatagacaatagagatttggttgcttggctgagtagagtgcgtgaaaaatacacacgtacttttttttttttttttttgagatggagtttggctcttgtcacccaggctggagtgcaatggcgccatcatggctcactgcaacctccgcctccccgttcaagcgattctcctgcctcagtctccccagtagctgagattacaggcgcccgccaccacgcccagctaatttttgtatttttagtagagacagggtttcaccatgttggccaggctggtctccaactcctgacaggtggtccgcccgcctcggcctcccaaagtgctgggattacaggcgtgagccaccgcacccggccatatttttgttattaattttcaaaggctttggtgtgggaccacatttcaacatggaaggccttaaacatgttccacactacttcctgagaattagacaagatttttaacaatattgttacctagttgggacacatttgtactgacccatgggatgaaaaaaagctgagtgctagcctagtgaaaatctacttacccgaaagaaatccctcttagtctgggtgcagtggctcacaccagtgctttgggaggcccagacgggcggatcatgaggtcagtagtttgagaccagcctggccaacatggtgaaaccccgtctctactaaaaatacaaaaaattagccaggtgtggtggcaggcgcctgtaatcccaggtactctggaggctgaggcaggagaattgcttgaacccgagaggcagaggttgcagtgagccgagaccgtgccactgcacttcagcctgggcaacagagcgagactccgtctcaaaaaaaagaaaaggaaaaaagagtccctcttaattatcagcatgtgtataggcctacagatacttcaggaatacctttaccattatcatcaacttgtatctacatagcatgtgaagattcaacaatttagttttttgggcgtcctcaagagtacgcacctataaccatatggcccaattgttaatctcctatacagtccattctgggaatgtttgggcttactgtgccatttttccgttcactgccttcccctctgcaatatacctttaacccttgctaggtcctgggtttggagagccagagaaccaactttggccctaaagaagctgtgtaggtagcaatatctgcctacgaagggccttgcaaccatttcctcttggaaccttggtttcctctttctgagtagtcactttgagtaccctttattaagttagaatgtaaaaacagtttctcactgatatatctgcagtgcctgagagagggcctggcacagagtaagtactcaataaatatttgaatggggccgggcgtggtgagacctgtctctacaagaatgaacaaaattagctgggcgtgttagcacatgcctgtagacttgggaggctgaggtgggaggattgcatgagtctgggaggtcgaggctgtagtgagccatgatcgcaccactgcactccagcctaggggacagagcaagatcctgtctcaaaagaaaaaaatgtatatatttgaatggataaagagatggctttgagtttctgagatatatatggtgctgtttatctaaagtaaacaagttttctgtaaatattttaaggctttgcaggccagctgtagtctctgtcacacattcttatttgtgcatgtttttcccaaccatgtaaaaatgtaaagtgcattcttagctactggggcaggttgaatttggcccatgggctagagtttgccaacccctaacttaaacctttgtactaactttatgaccactactggatttttgttgttgtttgttttagttctggtgcctgctttgtttttttttttttttttaatcctcttgctgatgtttcttggtgcagttactgtgccatttgtattggtgcttttaatgtaatgcaaactggtaataatatctaaacttgctggggttgtacataaaattattgaaaagattgaaaagatgctgagcattgactctgtggcattcattatgcccttttgtgattgctggattttagccatctttaggacatttgagctttaggagaagccaaattctgtataaatgacttgaagtgctaatagcacaggttttgaaacctctgcctgggtttgagtctcagctctgccttttactacctgtgtgatcctgagcaagttacttagtatccctgtcctctagtttcctcctctgtagtgtggggataataacatagacataacctgagagttagagtgtagagaaggctccctggcagatagtgctgtagaagtactggccattgccattactcaggtgcttgtgtttgctgaacctcatagtaagggctcggagagcactaagaggaggtgagaaatgctgctagattgacagcttgtccccagatagcccattcccgagagcaccttaggtttatacctgatttgtgttgtagttagtagtgtctctggtaatttgaactagtttcaggttggtcttgaaaacctggggaggttgggggtaaatgatttggtagcagttctcttttgtgattttatacattatctttgtagaactgcagtttgctaattctctgagcccaacacaatgaagtctgggcctaaaatcatagaatttcttttatttttttttttgtttttaatttatttattccctccctccctcctttcttcctttcttccttttctttctttctttccttccttccttccttctttcttttctttctttcttttctttctttggagtctcactctgtcaccaggctggagtgcagtggcacgaactttcttcagagtctcactttgtcaccaggctggagtgcagtggcgcgaactcagctcactgcaacctccgtctcctgagttcaagagattctcctgcctcagcctcccgagtagctgggactataggcatgtgccaccatgcccagctaattttcttatttttagtagagacgaggtttcaccatgttggccaggatggtcttgatctcttgacctcgtgatccacctgcctcagcctcccaaagtgcggggattacaggcgtgagctaccacgcccagcctattttttattttttgaggcagagtctcactctgtcacccaggctggagtgcagtggtgcaatctcagctcactgcaacctccgcctcctgggttcaggtgattctcctgccttagcctcctgagcacctgggactacaggcgcctgccaccacacctggctaattcttatatttttagtagaggcggggtttcaccatgttggccaggctggtctcgaactcctgatctcaagtgatcaacctgccttggcctcccaaagtgctggaattacagccatgagccaccatgcccagccaaatcatgagatttcaataccgctgaactttgattatggcaaagtgaacttctgctttgattaaagcttgatgagagaggtggctggggatagtttgagataagggcaaggcaggaaaatgcataatcttacgtgggctcattgtcattgtacaattcttttggtccatgtggaatttgatccgtcctatgacttaagttatgtttatttttgtttttatttttatttattttgtgtctttttgagagacatgatgttgctctgtcacctgggccagaatacagtggcacaatcttagctccgtgtagccttgaactcctgggctcaagtgatcctcccacctcagcccctcaaacagttgagattatagtatgaaccactgtgcctagccttaagtgatttttaaatttgtactgaacagtttgtcctttccttccattaaatcatattagaagtacagaacttgatatttcctgtagcaatacagtttttctttgatgaagtttgatttcaagtacttatttttcataatttaaagctattttttatagagagaattttaatcaaatatttggatgtcactattgctatatatggtattaagtatggtgaccatagtttgtaaactccaaactgacagcaagacaggaaatttgtgttagcaaaggcttttttcttactgtttgaattttttaaaaattagatacaatacagagaggagcacacaaatcattaagagtacagctcagcgaattttcacacagtgaacatgtgtaaacagcaagtaacaaaagatttacctgcatcctataacctcccattattcccttttctaggtactgtctctccactgcattcccaccaaatataaccactatgctgaattctgacatcataaatgagttttgcctgattttgagcttttgtgactggaagtgtacagtgtatataccctttcgattctgtcctctttagtttaccattgtttgagaaatttatccatactgttccagaattaactactgttaattattgttaattaactactgttgtagttaattcatcctcattgttatctagtattcttttgtgagtaaacacaatttccattctactgtgatcccagctatccatttgggtcgtttccagtttggggtccattacaaatagtaatgctatctgtaatgctattttgtattactacaaatagtaatgctatttgtggcacaaaaatactgcttttgtgaacattcttatacatgtcttttgatgaatgtatgtttgcattgctgttgtttacattatgtacctagtaatggaattgctagatcataggagatgtatatattaagctttagtggatgcattacataattattagttattattggttataccaatttatcctctcatcagtagtatacaacagtttctgtatctctaatctccaacattttagccattttagagtttgtgtactaacacattgtggttttaatttacatttccctgatgactaataaagttgagtacctcttttgtgttctttatagccatttgactgtcttgtgaagtgcttgtttgtcttgcctatttttcttttctttctttctttttcttccttccttcctttctttctttcttctttctttccttccttcttttctttctttctgtctttctttcttgtctttcttgtctttctgtctttcttggtcttgccctgtcacccatgctggagtgcagtggtgcagtctcagcttactgtagcctcgacctttttggggctcaagttatcctcctttctcagcctcccaagaagctggactacaagcacgcaccaccatgctcagttaattttttattttttgtagaaatggggtttcaccatgttgtccaggctggtctcaaacttctgggctcaagtaatcctcctgccttggcctcccaaaatgctgggattacaggcatgagccaccgcagccagccttggctatttttcaaaaggatataagtagaacatctgtatatcccttcaatttgcatattattcagtaagagttgcactctggtagtagaaatatataaggaggagaaagaagtggaaacaaaaagtctattctcatgagaagacttgggggatagtgttctctctagctccaagctacttattccttacgaaaagttgaagataaacttatctcagactgaggctgtctcaatgttgtcttcctattccattatacacatataacccatatttttttcaccagctgaattttgctcctagaaaattgattcatcaggaaaaatatccgtcttgcaaggtggttctctttagagtctgctgtgtgacatagctcaggacaaattgtgtgatgtcagataggttgggttaaggaatagaccttattggggaaagagagaacttggagggccaaggttagcaggagaaggaaatgttctctcatctgccgtcaattcagggaggggcaaacctggtgtctgtgttcacagggagggatccatccatctgtgattctcccttcttatcaggtagcatgggaaagctacactgttgcggggaggagggtcacacgcaggctacttagtaccaggcaccctggacttggattcaggttgccagttgtgtgagaaactgcccagcacctgaaggccctgaacccatgagaagttgtacctacctcccatgaggaggaatcctgtcatcccatgggagctgagcttgggtgcagtccctcttgctggcttgtccaggagtgagctccagggttgtttgggacagttctgctcattgctttacactgtgtatacattatctgtagagttccatgaagagaacttcagcactgtaactgcaagttttaacatggaacagaatttttctcacctgtattaattcttaagatttgaagttctatcaacaagcatttagattgtgtggagatttttttatttttatttttggagacagagtcttgctctgttacccagactggagtggcagtggcatggtcttggctcactgcaggctctacttcctgggttcaagcgattctcatgcctcagtgtcctgattagctaggactacaggtacacaccaccatgctggctaatttttgtatttttagtagagacgaggtttcaccgtattggtcaggctggtctcgaactcccagcctcaagcagtccacccacctcggcctcccaaactgctgggattacaggtgtgagccaccatgcttgactgacatcatcatgttaaaagaataaatgttctagggagctgggcacagtgtcatgtttctgtagttctagctgctcgggaggctgaggcaggaagatcccttgagccctggagttcaagtccagcctgggcaacatagtgagatctctttttttaaataaataaataactgttctagggactaaaatttcctttcaccattagtaatttactgtagaatctccaagaatgaacttattttaggtactgaaaatgagggagactaaatgttttatacagtagtttttagtaaaatatgagatttgatgcatttgatagatgatgtttgtttaaaataattcttaaatttttgatcatgtaattatagtttcattaatggtagatttgtaaaataaatgttaccaaatgaaaatgcatgtacctatgttaattatccttatctaaagctgaaagttcagttcaactatgttaaaacatagtaggggcctggcagggtggctcttgcctgtaatcccagaacttagggaggccaaggtgggcagatcacgaggtcaggagatcgagaccatcctggctaacattgtgaaaccgtatcgctactaaaaatacaaaaaattagccgggcatggcggtgggcacctgtagtcgcagctacttggtaggctgaggcaggagaatggcgtgaactcaggaggcagagcttacagtgagccgagatcatgccactgcactccaggctgggtgacagagcaagactccatctcaaaaaaaaaaaaaaagttggccaggtgtggcggctcacacctgtaatcccagcacttttggaggccgaggcaggcggatcacaagatcaggagtttgagaccagcctggctaacagagtgaaaccctgtatatactaaaaatacaaaaattagccaggcatggtggtgcatgcctgtagtcccagctacttgagaggctgaggcaggagaatcacttgaacccgggaggcggaggttgtggtaagctgagattgctccactgcactccagcctggacaacagagcaagactctgtctcaaaaaaaaaaaaaattaatgattaaattatttaggggagccgggcgcagtggctcacgcctgtaatcccagcactttgggaggccaaggcgggcggatcacgaggtcaggagatcaagaccatcctggctaacacaggatgaaaccccgtctctactaaaaatacaaaaatttagccgggcgtggtggcgggtgcctgtagtaccagctactcgggaggctgaggcaggagaatggcatgaacccgggtggcggagcttgcagtgagccaagatagcgccactgcactccggcctgggtgaaagagtgagactccgtctcaaaaaaaaaaaaaaattatttaggggaagatactatacaattctgtttaacaagtcacattttaattttttcttttggaaatattagcaagaaggctcactttgtgctcaacattgcctgaataacttattgcaaggagaatattttagccctgtggaattatcctcaattgcacatcagctggatgaggaggagaggatgagaatggcagaaggaggagttactagtgaagattatcgcacgtttttacaggtactgattttaaactcactaagtcacatttcttttttttttttttttttgagacggagtctcgccctgttgcccatgctggagtgcaatggcgcgatctcggctcactgcaacctctgcctcccgggttcaagcgattctcctgcctcagcctcccaagtagctgggattacaggcacacggcactatgcccggctaattttttgtatctttgttagagatggggtttcaccatgttggtcaggttggtctcaaactcctgaccttatgatccacctgtcttggcctcccaaagtgctgggattataggtgtgagccaccacacccggcttacatttcttttaaaaatgtggataccatttagaaaaggatgggccattcttcctatagggatctgactggtgaattataactgtgctgttaactttggaaatgggaatgcacaagatattgttttaaatatgcacgctaatgacagtttgtatccttctttccccacccccacccttgcttcaactacctgtcaaaattaacagcagccttctggaaatatggatgacagtggttttttctctattcaggtaagtagtcacaagcatgtactatgtgttgcttacatcccaggcaccgtttcacagcctttcaatagtcactgtaacaaggcgaccttcggaagttcttctgtctacagagtatagattatactctagagtactagattttttttttcttgagacagagtctcgttctgtcacctaggctggagtgcagtggcgtgatcttggctcactgtagcctctgcctcccgggttcaagcgatcctcctgcctcagcctcccaagtagctgggattacaggcacccgccaccacaccagttaatatttgtatttttagtagagatagtggggtttcaccgtgttggccagtctggtctccaactcctgacctcagcctcccaaagtgctgggattacaggtgtgagccactgcacctggccaactagagtactagatttttatatagataaacatgaaaggattgtagaatcttcatattagagtggggcatttaaaaattccttcttgagaaagattaatttgcatctggatgctaataataaccttaattctggccgggcgcggtggctcacacctgtaatcccagcactttggggaggccgaggtgggcggatcacgaggtcaggagattgagaccatcctggctaacatggtgaaaccccgtctctactaaaaatacaaaaattagctggacgtggtgacacgtgcctgtaatcccagctactcgggaggctgaggcaggagaatcgcttgaaccagggagtcgtaggttgcagtgagccaagatcgcgccactgcactctagcctggtgacagagcgagactccatctcaaagaaaaaaagaaatccttaattctaataagtcacaatgtctcaaacttaccatctgttgggtaaatttgagaaaatgcaataccttgctaccatccttttaaatcagcctaccagactggatttccttattatggtttgtggcttttgattttttttttttaatgtatagctctctttgaattctttggtggttatatatatatgtactcgcaagattcttttatctgtgggtctttcattctttttctaacactgtgagttgtatccagagtactttcggaacctctcctgagcgacctatctctgcagatatctttgtttatgtttcccttgtactgccctcctggactcttcctcatccaccagcatttccatctagtgctttaccgtgccactgctaacaggtaatggctactgcagggctgaaatcagaggccagagtaggcccagcacttggcgtttcctatttgtgccttgctgctcttggtgcctgttcatgtgtgcccactaccttgcactcaatttctgtctttgctggtacctggctcacttgcttctttgttggctaccttggagggcagatagtgaattttcagaaatttccctttttttgtcagacagattgaaataaacaggtttgcattttgttttttctacaagcggcaagcccatgaccctagaagtctgacatctatggaaccttcagtttaaatgcccagggagaacttattttggtagatatgatttctgacattgcaggtagcaagttgaatataatttttctaaagtagcacccacagcagccaaattatcagatgtatatagtagactagttttaagaaaagcacttatgggtagaatatacatctggatttttgaggcagttttatttaggaattgtgtggttttctggaacatctcagagacctggtatgaaaagcactcttctaatatatatgtgtttttttttatggatttagtgatatatctatacacacacactttttaaaacctatagccggctgggcgtggtggctcatgcctgtaatcccagtactttgggaggcccaggcgggtggatcacaaggtcaggagattgagaccagcctggccaacaaggtgaaaccctgtctctactaaaaatacaaaaatagctgggtgtggtggcgtgtgcttgtaatcccagctactcgggagcctcaggaggagaatcgcttgaacctgggaggcggaggttgcagcgagccgagatcgtgccactatactccagcctgggcgacagagcaagactctgtcacaaaaaaaaaaaaaaaaacctatagccttctagagaaatttatatatgaagtacacaactaacatagctacacttcctaaatttggaatggagtggtttagcttatgaaaagttgctatttttcttaacaggttataagcaatgccttgaaagtttggggtttagaactaatcctgttcaacagtccagagtatcagaggctcaggatcgatcctatgtaagattctgttttgcatttcatacatttcttttcccaaatttgatttttaaagttgtaatttcttaaagaagagaaatacattttgaatacttttgttttgatgttccctgtttcattcactcagactttcctatttcacctttgtgatgtccatgagcatctgccctgtagccttcctggcaccccagtgtctgtggcagcacagagctgaccccataagtggtgcatgaggccatcttgtggcacagcatcactaagctgctgcagagacgttcatatggttgtgtgatcttttaaaaacatcagtgacacttaactataaatataatcttaaattatcacaaattttatataatatttgccagtagacaacataaatatgaattcaatatttcaagttaatattgtctgttttcttttttagaaatgaaagatcatttatatgcaattataaggaacactggtttacagttagaaaattaggaaaacaggtaacatttcttacccttccttgtctttttttcttatattgtaccccatttaaaactaaaatgtgggccaggtgtggtggctcatgccaacagtttgggaggctgaggtggggggatcacttgaagccaggagtttgagaccagcctgggcaacaaagggaggtcctgtctcttaaaaaaaaaataaaaataaaaataaaaataaataaaaaaaaaaacaaagagccaggcatggtggctcacatctgtaattccagcttacttggaaggctgagtcagaaggatcacttgagctcaggagtttgaggctgcagtgaactatgattttgtcactgtaccccagcctgggtgacagagtaagactgttctataaaacataaaaataaaaaaaatatatttaaaaattaaaaaaaaaaaaggattgctgactttaaaattaggaaactgaccagtaatgtgtgtgtgtgtagcatggtttatccttcttgatagatagaaattgtcattttaaaagataatatcagttttccttataaatttatttgtgacaagtatatgcaatttaactatatcataagaaaaattctatattaaagataatacaaatgtggttacttttaagtgggtttttatgtgatgactatgttctgtcagttaattattacatttatagatttgtatttagcatagtgctgtcacaaagcctgaaatagtgtcaagcatgaataaagcattcaattatgtttgctttagtgtaagattattcattatgattccaaaagccatgtaatacgtacgtctacagaaaatcacttctattttttaaataaaacatgaaatatgtcttgagcaagctattttaagaaacaatcatttaacgtccttgttattagaattttgaatctttgaaagagggttattgaaaaccagctaggacagtaaaaaagaataaactagtgatacatgcagcaatatggatgaatctcaaaataattatgctgaaagaataacccacaaacaaaatactacctgctgtatggtatcatttattaaaagtctagaaaagtgcagattcatctgtagtgatggaaagcagattgaccagcggttgcctggggacgagaaggctatggaggagtgagaggggagggttacagagaggcacgggaaacatggcaatgaggaatgtgttcactatcttggttgtagtaatggtttcatgggagtacagtatacaaatgtgaaaacatttcagaggccagatgcagtggctcatgcctgtaatcccagcacttttggaggccaaggcaggaggattgcttgagctcaaggagttcaggaccagcctgggcaatggcacaagaccccatctctaaaaaaaaaatgaaagaaaaaaaaattggctaggcgtggtgatgcatggccgtagtcccaggtgctagggaggctgaggagggagcacagaggtcaagcctgcagtgaatcatgatcgtgctactgcactccagcttgggtgacagaaggagatcctgtctcaaaaaaaaagtttcaaattatacactttaaatatgtgcagtttattatatgtcacttataccccaataaatctgttttttttaaaatgtaaatacaagccaaaaaaggtataagtcaagaaaatatattgaattaaatctgtaagagataattcaaaaacaaaaaccctattgttatcttttaagtcacccaaatcaaatttgggaaaagtcacctacttagcttcatcctaagttggttctttctttctttctttccttcttttgagacggattcttgctctatcgcccaggctggattgcagtggcgggatcttggctccctgcaacctccgccacctgggttcaagcaattctcttgtctcagcctcccaaatagctgtgtctacagccacgcaccaccacacccagctaatttttgtatttttagtagagacggggtttcgccatgttggtcaggctggtcttgaactcctgacctcaggtgatccgtccgtctctgcctctcaaagtgctggggttacaggcgtgagccaccatgccgagccctaagttggttctttcttaaagttcttcctgaggagccaagagcaagttaaggagatgtaacctagaagcttacagtggaggctagctgggtgcagtggttcacgcctgtaatcccagcactttaggaggctgaggcagggagatcactgaggccaggagcttgagagcagcttggcccaacacagtgacaccttgtctctacaaaaaaaaaaaaaaaaaaaggcagcttacagcagtagaggctgatgcgagtgggaatcacctctaggtaaaaaccagtgtagcgtactgctgagattatttaacctctgggttttatttatgtgtttttaaaaattatgatccagtattttttacttttttttgtataaagtaagcactgaatttttaaggttgtattaatttgcaaataaatgtctatcttattattttgagagatttaaaaaattttagttcttcaaaattgcattttcacattttgaattacgttatctttgacaaatacagaagatgtcaaattttggtttattttctttggttctaatttatatttttgtttaaaactatatttttcactatagactctttctgtctctcgaggtccctgtataatgaaaaagaaggctggaaaaagtattaacattgtcaaaatccaggaaaagtagttggtcatgatattgatcgttaactttagaaactttttgtatcttgtgggttaaattaggattactatgtggtagtgataaatgatgttaattagggccgagtgcagtggctaacacctgtaattccagcatgtagggaggctgaggtgggaggatgtcttgaatccaggagtttgagaccagcctgtacaacatagtgtaagaccccttctccacacaaaaaaattagaaaatttgtcaagcatcttggtgcacacctgtagtcccagctgcttgggaggatgaagcgagagaatcacttaagcccaggtgttcgaggctgcagtgagctatgattgcaccactgcactccagactagatgaccatctcttttaaaaaaatgtgtttatatgttatatgtgatagtgctttttaaaaacatttttaaattatagagacagggtctcactatgttacagcccaggctggtctcaaattcctgggctcaagcaatcctcccaccttagctaacctcccaaagtgctcggattataggcatgagctgcatgcccagctaatttagtgatttttaaaaactgagctggtaattataaattctcttcctggaacttctgactttctcacaattggaatcttttgacaaaaattatcagtaatgggaaaactttgtgtagttgtcatttttcctcccatcagtgtgatagatatgattggagttatgttggactgatattttgaaaaaagatttaattatagctattaataaagacatttaaactactgactatgcatttttattcttttgggagggtttaatgtttatagtttaaagcaaactgttgtttttaaaaaagtatctaacagggccgggcgcggtggctcacacctgtaatcccagcactttgggaggcctaggcgggcggatcacaaggtcaagagatcaagaccatcctggctaacatggtgaaaccctgtctctactaaaaatacaaaaaaatagctgggtgtggcggcgtgcgcctgtagtcccagctactcgggaggctgaggcaggaggatggcatgaacccgggaggcggagcttgcagtgagccgagatcgcgccactgcactccagcctgggcgacagagcaatactctgtctaaaaaaaaaaaaaaaaaaaaaaaaagagtatttagcagaggccaggtgcagtggctcatgtttgtaatcccagaactttgggaggctgaggcgggcggatcatttgaggtcaggagtttgagaccagcctggccaatgtggcaaatgtgctgtctctaactaaaaatacaaaaattagctgggtgtggtggtgcagacctgtagtcccagctacttgggaggctgaggcaggagaatcacttgaacctgggaggcagaggttgcagtgatccgagatcatgccactgcactccagcctgggttacagagtgagactcttctcaaaaaaaaaaaaaagtatttaatagtgataaatctgcagtattctcttgtagtttttaagatcatattattcagtcaaagaaaagagctcaacttgaaatatttccagagtttaaacaatcttactaagctttgatgggttgtatctattcttaacatgtgaaacttccttattacctataatatacactaacttaaatattgacaatttttttccagtggtttaacttgaattctctcttgacgggtccagaattaatatcagatacatatcttgcacttttcttggctcaattacaacaggaaggtaagtaacggctgaacattttgtaatgttacctttcgaagtagttaaataaccaggcacattagatgacagtgtgataaaactgtttttctggcagtggcagtgaaacaatctttagttttgacgtggtgataggctgtgatttgggtgacgctgttcagttagagttctcactgacacctggcccttcctcttctgaggatgctgctttctttgcagcccttctaagtaatggctttttcttttatacatcacatatcacacggctgagaggagggatagatgtttttcttctttgcctcttctaggccactgttcttccttataaactccagtttctttgaaatacatgcccctaacggctgggcacggtggctcacgcctgtaatcccagcactttgggaggctgaggcaggcggatcacgatgtcaggagatcgagaccatcctggctaacacggtgaaatcctgtctctactaaaaataacaaaaaattagccggggtgtggtggcggacgcctgtagtccgagctactcgggaggctgaggcaggagaatggcgtgaacccaggaggcggagcttgcagtgagctgagatcgcgccactgccctccagcctgggcgacagagcgagactccgtctcaaaaaaaaaaagaaaagaaaaaaaaaagaaatacatgcccctagattaaactatcccttgtccttttgcactcatccacaagtctcttttcatcagtgattttaggatctgactcgttgtctttttctctacttcaactacttttatcattcttaattatttctgtatcgtcaatcaatccagtacctgcctcttagtttcaaaatcacttactcttgcttagctattaccagtaatcataaccactgtcaaatctcaattgcaagcatattactctttaactaccacctcctatctttaaaccatgttttgtctgtttttttattccagccattctttaaaccctactgtggggcccaagcatttcctttatacgcattcttcctttcttctactgcttattttctgtaatccgtcatcataatcactccattgcattcttcaacgtgtttcccctctctccctccatcatacttgaatgacaaaaatctcaaccctggttaaaccacatcttggccttgtccattcctgtaccagagtagctggacgtggctaaaaaataacataaaacatgatgattggttttacttttttcttaaatgatctatccatccattcacccatccatctatcaaagtgactaggcctatttctgaagcccaggctggagtgcagcagcataatcacagctcattgcagctccaaactcctgggctcaagtgattctcttgccttagcctgttgagtagctgggactacaggcttgtgctaccacacctagctaaggttttactttaaatttattataatcacaaaattcagatgagcctttagtgctgtctgatatttctactatgttttcttagtgatgtaccaccctccaaggtgtttataaaaaattatgtaccactctccaagaagtttataaaaaataatgtgccaccctccaaggtgactaatttcacagcttatgtctttaaacctttaagcactttcctctcccttacacaccttccttgtggctttccgttacattctgctgagaacatagaagcaattaaaattatgttctttctaccagcaaatttatcaatttgcttatatcttcacctgtgctttgagcctatttaaatagatgaatggtcccctacctctaaccaaaaccagtccctcacttgtgggctggatcccagctcttctcacctactcaagatgttcctgctttcatctctccactctcttatataatcagttccccccccctttttttgtaatattcctataagcagtaaaataagctttttatttccattgattaaaaataaaaatcctctcttaattccatgaaactccagctgcctccccatttttattttttccttaggattgtctctagtgtgccttctccttttcttgaactctgcctcctgggttcaagcgattctcctgcctcaacctcccgagtagctgggattacaggcgtgcaccaccatgaccggctaattttttttttttttttttgagatggagtttccctcttgttgctccggctggagtgcaatggcgtgatctcggctcaccgtaacttctgcctcctgggttcaagcgattttcttgcctcagcctcccgagtagctggatttacaggcatgtgccaccatgcctggctaattttgtattttagtagagatggaaggggtttctccatgtttgttaggctggtctccaactcctgacctcaggtgagccgcccacctcggccccctaaagtgctgggattacaggcatgagccactgcgcctggccccggctaaattttttttttttttttttgtatttttagtagagacagggtttcaccatattggccaggttggtctcgaattcctggcctcgagtgatccacctgcctcagcctcccaaagtgctgggattacaggcgtgagtcaccttgcctagccatcttttagtaatggtatttggagatcacaatttgagtgctggcatgcttattgctgctgggtttgttatgtagttattgtgaattcacatttaggaatatagggtttttaattctttgattttagatacttgtatcttttttcttttatatttaaaaccttggttcctgatgatatcccttcttagaaaccctgtctacctttggccttcagcccaccatgctgtggttttcctaacttgctgcctgcacttttcagattcctttcatggatcttaaatatcatctgtaaataagatctatgtgtcaataattaccaaacttttatctttagtcttgacatctaccctgaacacctagctttgactaactcctagctttggcatctccacttggaaatccaaaaagtgtttcaaactgaacatgtctatgaaagacttatttttttctctctatccatgctatccatcaggttttccatttccataagggtgactcttgtactctggttcctatatattataccgacagagcagcccagagtgcttcttaaccagtgtaaggcctgttatgtcccaccctcactctttgtccttcagtggcttcccagcacacttagaataaaatctgaagtcttaggccgggcttggtggctcatgcctgcaatcccagcactttgggaggatgagggggcagatcacttgaggtcaggagttgatgagaccagcctggccaacatggtgaaaccctgtctctaccaaaaaatacaaaaattaactgggtgtggtgttgtgcacctgtagtcccagctactcgggaggctgagataggagaatcacttgaacccgggaggcagaggttacagcgagccaagatcataccactgcactccagcctgggtgacagaacgagactctcaaaaaaaaattaaaaaaaaaaaatatgtgaagtcttgaataaaacccaagatctttaccatggcccctgaacagggcagagtatccattcttcagacactcttcatagaataccatggtgagctggcatatttattatacaatacagaaacaattttactggcagaaaacacattaaaccgtctaaactctgaatacagttgtcctcataaaaaatgttcaacatactattttgaggttttccattaatagttcttataatctttgtcccattatgtgttaatccaacaaaggatatccaataacaaacaccaaagtttaagaaaaatgtgctaggcgcggtggctcacacctgtaatcccagcactttgggaggccgaggtgggcagatcacctgaggtcaggagttcgagaccagcccagccaacatggtgaaaccctgcctctcctaaaaatacaaacattaactgggtgtggtggtgggtgcctgtaatcccagctactcaggaggctgaggcaggagaatcgcttgaacctcctgggaggcagaggttgcagtgagctaatattgcaccactgcactccagcctgggtgacagagtgagactccatctcaaattaaaaaaaaaaaaaaattaatgatagagaaacttaaatcagttagattgttttaggtatagcccatccttggtttttgtgtgtagcatctagcttggggaaaccctggatttctggaatcatatttagacacagtcacactagactaatgtaattcttttgggatgcaaaccacacgtttgacaccttaaatagcttttaggtatttggcttcccagcccctatttttagttacaaggggtgtacatgtgtgggtcagggtgggggtagctctttccgcagatgattagttttagccatgttactagttattgcacacattatctgtgtcctcacagcagccctgtgagtaagtgtattagggttctctagagggacagaactaataaggtagatgtatatatgaagggtaatgtattaaggagtatcgactcgtatgatcacaaggtgaagtcccacaataggctctctgcaggctgaggaaccaggaagccagtccaagtcccaaaacctcaaaagtagggaagctgacagtgcagccttcagtctgtggcaaaaggcctgagagcccctggcaaaccactggtgtaagttcaagagtccaaaagatgaagaacttggagtctgatgtttgagggcaggaagcatccagcatgggagaaagatgaaggctcagcaagtctagtacttccacactcttatttctgcctgctttattctagctgagctggcagctgattagatggtgaccacccagtttgagggtgggtctacctctcccagttcactggcttaaatgttaatctcctttggcaacaccctcgcagacacacccagaaacaataatttgtagccttcaatccaatcaagttgataatattaaccatcacaggaaggtactagtatcatatgtttaacagtagaaaccaagacaaatgcagctaggaagtgggagaactgggatcagatgcaggcagtctgattctaaatcagttgctgttacccactctgacaacagtaagtgagtagcctgctcagtcaagtactatattagtagggccctttacagacatatttatttctcacagtcactcaatgagacggctcttccagtcttacaatggagaaagtgaggctcagagactttaagtaacttaccttagacgactttactagtaagtataagaatcattatttggactaaagtctttctgaatcctcagcttgtatttttttccagtgttctgtgctgcctttttatctactagtgttttacatcaattttgaatctctttactaactggttaggttgatttttgccttttttttttaggttattctatatttgtcgttaagggtgatctgccagattgcgaagctgaccaactcctgcagatgattagggtccaacagatgcatcgaccaaaacttattggagaagaattagcacaactaaaagagcaaaggtaaaaatgaggcctgcagtatggaatatatggtagtatttcattatgagaattaaattttcatgcttagattgaatatgtggtccttgtgttgttggcgactctattttggaccttatattttagtgaagtttattagtttaaacttgaatcaactctttgaaatacttaaatatattaacttagttagctggtatggtatattcctagcacttcgggaggctgaggcaggctgattgcttcaacccaggagttcgagaccagcctgggcaacatggcaaaacctcatctctacaaatagtacaaaaattagccagatgtggtggtgtatgcctatagtcccagctacttgggaggcagaggaagaaggatcacctgaaactggggaggtagagactacagtgagccataatcacactaccgcactccagcctggtcgagagagtcagaccctgtctcaaaaaaaaaaaaaaaaagaaacggaaaaaaaaaacttagttggattcaaattgcaacacaatcattatattactagagcttatttgccagaaaacattttaagttttgacttacttaaagcctttacattacaaatgcctttatgttatgtctaaaatagaagattggttgcagttattaccagtgcttttgttctttagagtccataaaacagacctggaacgagtgttagaagcaaatgatggctcaggaatgttagacgaagatgaggaggatttgcagagggctctggcactaagtcgccaagaaattgacatggaagatgaggaagcagatctccgcagggctattcagctaagtatgcaaggtaaagacattctgatgtgtgttgtattcattgctgaagaattgattccaattattcttagatttcatggaagttaatgtactcttagaggtgttttgacaattactgcagaagcaatagctatatagtgggctttccctttagatttcttataatggaaatcactttttacaacctatattttattaggagtagttatatttttactcctggttattttatttggtttcaacactgtactaacacaatagtaaattgtggttttaatctttgtgggtatcagttgacccttatccaaatcagctgttacataaatatgtgccattagacactatggaagggcctggacagggaatataaactgattttacaaaaacccaacatttattggctatgcaacttaaaccgtaagcccactttggtgggcccagttttttagtgatataaactatcaatagagaaaagcgaaaacatatcccctagacaatctaggcaaagaaaaatgttaagacatagctcaaagtagcttaattaaaagtttgaagtgggttttttgttttatttttttctaactcatatgtatttgcttctactttctaatgaaattatttatcagttgatttccttagatatctaaataaaattgaaatttcattaatgggaagattatttttatcctgaacttttcttgcctctatgcatgcctctgagtactccatatggtgtgcaatcccatttttgattaatagagtcctgctggattagcagggacagaaatcagctttagatttctttcttttttttttttctttctttttttttttttttttttttgagtcagagtctcactgtcgcccagcctggagtgcagtgatcttggctcactgcaacccctgcctccgaggttcaagcgattctcctgcctcagcctcctgagtagctgggactacaggcgcctaccaccacgcccagctaattttttgtacttttagtagagatagggttttgcccttttggccaggctggtcttgaactcctgacctcaggtgatccacctgccttggcctcccaaagtgctgggattacatgtgtgagccaccacgcccagccagaagagtagaatattcttaaagagaaaacgttttaaaggcttactcaaatgagtataaacaaacatattgttgcttgaattggtaaatacagtgattggtttttgttgtgttgtgttttgttttcaggtagttccagaaacatatctcaagatatgacacagacatcaggtacaaatcttacttcagaagagcttcggaagagacgagaagcctactttgaaaagtaaagtagttggtacaagttaaagtagcatgtttaatatttgctttggctattttgtctatttgtaaatggttactgcctgaatcctgtgaatatttgaatgtattttttaaaaatttacagcaaataggacgggcacggtggcttacgcctgtgatgctagcagtttgggaggccaaggcgggcagattgcctgaggtcaggagttcgagaccagcctgggcaacacagtgaaaccccatctctactaaaaatacaaaagaatcagctgggcatggaagcgtgcgcctgtagtcccagctgcttgggaggctgagccaggagaattgcttgaacccgggacgtggaggttgcagtgagccgagatcgcaccactgccctccagactgggtgacagagtgagactccgtctccaaaaatatatgtatatatatataaataaaaataaaaatttacggcaaataacatgaaacaaaaaaaccttgccccaatactggataaattttttaaactgagtgaaggaaaccttataaaatttcatttattaaaagaaaaatgaaattaggacaagacaagaagaatgccaattgatcctttggatgtacttcttgcttacctgattaaccctgcaaaattcctctaccaatcagtacgaaaaacagctttggaggtatgggagcgcattcccaaatagacgtggtagttcatttagctgctcatggccgcttcaggcagtcctgtaagcctgttagcatcaggggaatggatgcaaaccataaatctggatcaactcctaaaaccttaccttgtgcccagccttgtaagtgcttgctaaataggaattccaccatatgaaaatacattcttttcaagtaactatcattcagacttttgtcccccactttttttttttaaagaaaaataaaaggctgggcacggtggcttacgtctgtaatcccaccattttaggaggccaaggcaggtggatcacctgaggtcaggaattcaagaccagcctgaccaacatggtgaaacctcatctctactaaaaatacaaaaattagccgggcatggtggtgggtgcctgtaatcccagctacttgggaggctcagacaggagaatcgcttgaatctgggaggcagaagttgcagtgagctgagataacgccattgcactccagcctgggggacaagagcgagacttcgtctcaaaaaaaaagagaaagaaaacttcatgttaaagattacaagataaataatcagacccactgatcctaggtcagaaaacagagtcatagctcaatctgacttactatttgctgtatttcatccattctgagatgcacatagtttcacatttcaatgtctctgaaattgagaagcatcttacagtcataattgacagtatattagcagcacctataaatattggctcattttacatttgatggtataatgaagaaaatatttacctttttttctgttttgtttttaagtcacaactcagaagtagatgaaggaaaattctgatcagctgacatcctcttaatgtgagatatttctagtctttattcagtatagattaatggctaattatatgttaaatttcaaagtagtgcttattagtgctttttacttttaagtttcaaaattaacttttttattataataaactccaaatttatacaaaagtagaaaaactagcatactcctgtttatgacccagattcaacaaatactagcacacggccaatcttgcttttttttttttttttttttgagatggagtcttgctctgttgcccaggctggagtgcaatggcacaatttctgctcactgcaacctctgcctcctgagttcaagcgattctcccacttcagcctcccaagtagctgggattacaggtacacaccaccatgcctggctaattcttgtatttttagtagacacgggatttcaccatgtcgtccaggctggccttaaactcctgacctcaagtgatccacctgcctcggcctcccagagtgctgggattacaggcatgagccactgagcccggcccaatctcgttttataatactcccatctcccattctttccactgtcccacctgcaagtttggattattttgtaacaaatctcaatcatcatattattctataaccattttaatatgtgtctctaaaatatattagctttatttttaacatagttaaatgctattgtcataaaataataatcataataattaattgtaattctatatcatcaattatctagttaatgtaaaaaataaatctaaggccaggcgcggtggctcacacctgtaatcccagcactttgggaggctgaggtgggcagatcacctgagatcaggagttcaagaccagcctgaccaacatggagaaaccccatctctactaaaaatacaaaaaattagccaggcgtggtggcgcatgcttgtaatcccagctacttgagaggctgaggcaggagaatcacttgaacccgggaggcgaggttgcggtgagccgagatcgtgccattgcactctagcctgggcaaaaagagtgaaactccatctcaaataaataaataaataaataataaaaaataacttaaatctacttaattagaaaaactaacattctaaaaattttattttaagaaatatcaaaattggctgggcacggtggctcacgcctctaatccctgcactttggaaggctgaggtgggcggatcacctgaggtcaggagggtcaggagtacaagaccagcctggccaacatggcgaaaccctgtctccactaaaaatacaaaaattagccaggcatgatgatgggcacctgtaatcccagctactcaggaggctgagacagaagaatcgcttgaacccaggaggtagaggttgcagtgagctgagatcaccccactgcactccagcctgggtgacagagtgaaactccgcctcaaaaaaaaaaaaaagagaaaagaaatatagaaattaaagcatacatggccaggcgtagtggctcatgtctgtaatcccagcactttgggaggctgaggcaggcagatcacttgaggccatgagttcaagaccaacctggccaacatggcgaaagcctgtctctactaaaaatacaaaaaaattagttgggcatggtggtgcacacctgtaatcacagctactttggaggctgaggcaggagaatcgtttgaacccagaggtggaggttgcagtgagccgagattgtgccactgcactctatcctgggtgacagagcgagatactgtctcaaaaagaaaaaaaaaaggctgggcgcggtagttcatgcctgcaatcccagcactttgggaggccgaggcaggcagattacgaagtcaggagatggagaccatcctggctaatacagtgaaaccccgtctctactaaaaaatacacaaaaattagctgggtgtggtggcaggcacctgtagtcccagctactctggaggctgaggcaggagaatggcatgaacccgggaggtggagcttgcagtgagcagagatcacaccactgcactccagtctgggcgacagagcgaggctctgtctcaaaaaaaaaaaagaaagcatactctcacctccttcagtgactgatgttagtattttggcacattctttttctgtgacatatacacacttaccttgtaagtgttgtactcatttcctatgacagtaaatagtctttgtaacaggctgcatgatatttcataaaatgaatggatgtggcataatttatatgtgagccttttgaattctgctattataattaatattgcaatgaacaattcttatattgcctctacacctcaaatgtcttatcatttcttctagtttttctgaggatgtcagattattgggttaaaggatatgaacatttttaaggccttggaacagatttctaaattgctttccagaataattcccatgtgatactttcaccatgtttatttcagacttttttttttttttttttttgagacgaaatctcactctgtcacccaggctggagtgtagtggcatgatctcggctcactgcaacctccgcctcctgagtttaagcgattattctgcctcagcctcccaagtagctgcggttacaggcaagtgcctccatgcctggctaatttttgtgtcttttgtagacatggggtttcaccatgttgcccaggctggtttcgaactcctgagctcaggcaatctgcctacctcggcctcccaaagttctgggattacaggcgtgcaccaccgcgcccagccatcagagtcttttttgtcaaaataaaatggtctaaagacatacatcatagagaaactataatacaaaatttacaggtatatctaagaaaagaaaagtatatttaaagcataaaaataaactgctcttttacttaaaattttttaaaaactggattaaaaatatgaaacttccaacaaattgagcttttttttttttttttttcttttttgagacgaggtctcgcttttgtcacccagtctggagtgcagtggcgcgatctcggctcactgcaacctccacctccctggttcaagcaattcccctgcctcagcctcccaagtagctgggattacaggcgcatgccaccacgtcgggctaatttttttgtatttttagtagagagggggtttcaccatgttggccagactggtctcgaactcctgatctcaggcaatctgccagcctgggtctcccaacatgctgggattacaggcatgagccactgcactcggcctgaactttttatagtagtaacgataattcagtaatgtccaataatgactaagtaagttataacaagtacaatgtcagcaataactagtgctttttagtaaacagggtcaggcaaccttgtacccttttaaaaatgttcgaatatcgatatacctccttcctacttggtggaggattgattgaggaggaaagtgtgcagtgatggttaccagcttcagcctcttggcttgactttgcaaatactggtgagaatttggaaagagcttgagaatatcttacatagtcacatgttgctgagaagagttaagaactaacttcttgatgttcatttttaacaatggcttgcattcaaaaccttgtagagctcattagtaggagctaagaagctaatatttgcctttcactaaaattcctgattacttagcctaggtagttcgttgtctctctaggttctgtctttgggagcttgggtctaaggttatcaagctaactctttcttccctctcacccttcccaaattgaccctggtgctgatttgttattcatacgattttctagtttttcttttccctttttgagtatttgaagcttcatactgaatatagtaatcatagtattcatgcataaagaaaatcataaagtaattgcataaatgcataaagtaatcatagttttcatgcattaaaaaaactagttttggctgggcgctatggctcacgcttgtaatcccagcactttcggaggccaaggcaggcgaatcatctgaggtcaggagttcgagactagcctggccaacatggcgaaacctcttctctactaaaaatacaaaaaaattagccgagtatggtggcgggcgcctgtaatcctagctatttggcaggctgaggcaggagaatcacttgaacctgggaggcagaggttgcagtgagccgaggttgtgccattgcactacagcctaggcgacaagagcaagactccatctcaaaaaaaaaaaaaaaaaaaaaaaaactccctattacagattcataatttatgagtcattaaataatattttcaagccatgacattttttccagcagtagtctctaaatctgttttaccatcataaaaccccaagcaaaactctactacatcagctgtgtcactgtaaaacctgccttaactcacagaagcatgaaattaagcaatgtgtgtgaaactattttataaactgtaaagtattccatacatacatgttggcagttattaatgtcttctctaggtgtggctttgaaatggatgcagatgctttctgttacaaaaaacataagttgcaaatgttctataacaaggagagacacaaatatcttcatggacatggattgctatgagtgtttgattgcctaatacttgagccaccacttcagtgatatggtataatttatcaaacagtgttgagaaacagaaactactggggatgttttaaagaggaaaatacttaatatagaaattaggggtttacataatcttaagaaaggatgaaggtgcagctcttagccaggcctccacagtaccacaaaccaacttgcaggaagagctgtaaccactgccccagttgggacaatgggtaatgaggatattaaatttaagaacatactgctatagcaatgatccttggcatagaaagctgccaccacaattgcctagagatgggaacatgaagtctggcccccattgcaacagcagtgaagcagaattttgggactggcatctcccaaatggctttgcttgccaccagagaacaaccaaagtggagggagatggctaggcctcatttctgcctattttattttattttttgagacggagtcttgtctgtcgcccaggctggagtgcagtagtgtgatctcggctcactgcagcctccgcctcccagcttcaaacaattctcctgcctcagcctcctgagtagctgggattacaggcacccgccactgtgcccagccaattttcttatttttagtagaggtggggttttgccacgttggccaggctggtcttgaactcctgacctcaggtgatctgcccgcctcagcctcccaaagtgttgtgattacaggtatgagccaccatgcctggcccatttctcccttttttttttttttttttttttgaggtggagtctcactctgttgcccagactggagtgcagtggtgcaatcttggcgcattgcaacctctgcctcccagtttcaagcaattcttctgcttcagcctcctgagtagctgggactacaggtgtgtagcaccacacctggctaatttttgtttttgttttgttttttttgagacagagtctcactctgtcacccaggctggagtgtagtggcatgatctgggctcactacaacctccgcctcccgggttcaagcaattctcctgcctcagcctccagagtagctgggattacaggtgtgcgccaacacacctggctaatttttttgtatttttaatagagatggggtttcaccatgttggccaggctggtctcgaactcctgacctcgtgatccgcccgcctcggcctcccaaagtgctgggattacaggcatgagccaccgtgcccagacaaggtttgtatttttagtagagacagttttgccatgttggccaggctggtcttgaactcctcacctcaggtgatccgcctgccttggcctcccaaagtgctgggattacaggcgcaagccactgtgcctgacccgtttctgctttttaaagctcatgtgagcacttaatttgtaaccagaatcctacttgtaaaataatctaagacatgtagcttttagctttgtaacctctataatattgatggcacagtgggagtggatgctgagtaccacttgaacatgttccacctcagtgtcttcacagctggaaggtgtctacattgtttcaaggtggacaattgatttacttctcatttttcataaactaaaagtagaataaaggctattcctctaaaattgctatctcacctgtcactcccttgcattctcacataccttcttgagtggaggggcagagggcatggagtgatagcagatgtgccaggaattctccataactcagtccgtccctcttgtgctatgttgcagcatcaggatttgctaatgggaggatactgcccttacgtgcatcattagccatgcacactaaggtcttacacctacacacaggtcagtattctggctcagagaccaacagggagaaattgcagttctcattagttgaactttctttattgttcacagttttaaaacacaaaattgagaggaactctataaaaaatgtgccattctattaataattgttgctggtaatttaaaaatccttgttccttttcaaattcttatataccttttttttttaaacacttgatcttagccaaaagaccgagaagcaatcttttttttttttttttttttttttaacctatagcttctcactgagattgtcagctgtttgtaagttttggtttttggttttctgtgtttgtatttacatatatgaaatacagattgagtatcccttatccaaaatgcttaagactggaagtgttttagatttggggttttttaggatttgtgaatatttgcactatacttaccagttaagcattccaaatccaaaatttcaaatctgaagtgttccactgagcacctcttttgagtatcatgttggtgctcaaaaagtttctgattttggagcatttggatttctgattctcggatttaggatgcttgacctgtaatttcagatttacataaaagcagaaatagtacacagagctccttatatccttcacccagattccccaattattggcctttctgaaccatttgggaataatatgcagatatgattttccattatgtctcagttgttcagtgtatattttctaagtacaagaatatattcctacatatttacatgataaccgtcatgtttaaacattttaaaatggggatttgtattacattgtttctctttttgaaaaaattacagaggagcttaatgcaatcagtattacttaaaatctgataatgtgtgttaaatagtagttttcatttatttcatttatcaggtgttcagtgaatgcttactatgtaacagcacagttatcagcactggggaaatagatgagtaagataagatttgcactttcattagcttacatgccataaagagggaaataaagagaacaccagatgatgataagtttatgctgagaattaaaatgaagtgatgaaataatgggaatgtcaggtggctacttttggtgggatggtcaggaaaggcatctctggggagataaattttaagctcagacctgagtgaaaagaatgagccagccatggaaacattatgttaactcacatggtagtttgaaatgctttatctgatcaaaggtacttatttttggtgactttcaacaatattaagggtctataaaccaacactcatttgcataagaataactaccagtgaatctttttgtatgataggttttttgtttgttgtttttttgagacagagtctcgctctgtcgcccaggctggagtgcagtggcgcgatcttggctcactgcaacctctacctccccggttcaagtgattctcctgcctcagcctcccaaagtagctgggattacaggtgcctgccaccacgcctggctaatttttgtatttttagtagagatggggtttcaccgtgttgtccaggctcgtgtcaaacttctgacctcaagccatccacccgcctcggcctcccaaagtgctgggattacaggtgtgagccaccactcctggccatgataggttattttgtgatgaaaatacctacctcttaatttgtctgataaatttaaattttatgtctagatttcctaagatcagcacttccatattttaaagtaatctgtatcagactaactgctcttgcattcttttaataccagtgactactttgattcgtgaaacaatgtattttccttatgaatagtttttctcatggtgtatttattcttttaagttttgttttttaaatatacttcacttttgaatgtttcagacagcagcaaaagcagcaacagcagcagcagcagcagcagcagggggacctatcaggacagagttcacatccatgtgaaaggccagccaccagttcaggagcacttgggagtgatctaggtaaggcctgctcaccattcatcatgttcgctaccttcacactttatctgacatacgagctccatgtgatttttgctttacattattcttcattccctctttaatcatattaagaatcttaagtaaatttgtaatctactaaatttccctggattaaggagcagttaccaaaagaaaaaaaaaaaaaaaagctagatgtggtggctcacatctgtaatcccagcactttgggaaaccaaggcaggagaggattgctagaacatttaatgaatactttaacataataatttaaacttcacagtaatttgtacagtctccaaaaattccttagacatcatggatatttttctttttttgagatggagtcttgctctgtcacccaggctggagtgcagtgtcgcgatctcggctcactgcaagctctgcttcctgggttcatggcattctcctgcctcagcctcctgagtagctgggactacaggcgcccgccacatcgcctggctaattttttgtatttttagtagagacagggtttcaccatgttagccaggatggtctcaatctcctgacctcatgatccgcccgcctcggcctcccaaagtgctgggattacaggcgtgagccatcacgtccggccagaaatcatgaatattagtaggtgaaaaataaacacattttaccacctggaaaatgaaaaatacttgagtataatctaaataacaatgggaagtgcagagttactttccaggtctcggtttaaatatgtcttaaactttggccaattagtagtagaagttgagagaaaaagtaactatctgacaaagaaattataagcagaatatataaagaactcttaaaactgaataatcagaaaacaactcaataaaaaggtgaaggatttgaaaagatatttcaccaaataagacatagggatgacaaataagcacatgaaaagactctcagcatcactagtcacagggaaatgcacgataaaaccacagtgagacaccatggcacccctgtaggtatggctttaatgaagaaataaaactgacaataccaagtgttggcaaggatccaagcagctgagactcatatactgttaatgggaatgtaaaagtgtacagctttggaaaacagtttggcatttttttgataaatgtatacttagccatgtgatccagcagtcccaatcatgtatatataaccaaaagaaaagaaaacttaggttcacataaaaacttatatcaaatgcttatagctgaccaggcatggtggcccatgcctataatcccagcactttgggaggccgaggttggcagatacctgaagtcaagtgttcgagaccagcctggccaacatggcaaaaccctgtctctacttaaaatacaaaaattagccaggcgtgatggcaggcacctgtagtccagctattcaggaggctgaggcaggagaatcacgtgaacccgggaggcagaggttgcagtgagccgagatcgtgccactatactccagcctgggtgacagagcaaaactctgtctcaaaaaaaaaaaaaaaaaaaagggctggacacggtggcttacgcctgttatcccggcactttgggaggccaaggctgatggatcacctgaggtcaggagttcaagaccagcctggccaacatggtgaaaccccatctctactaaaaatacaaaaatttgctgggcatggtggtgggcacctgtaatcccaggaggctgaggcaggagaatcacttgaacccgggaggcggagattgcagtgagccaagattgtgccattgaactccagcctgggtgacaagaccaaaactccttctcaaaaaaaaaaaagattatagcatctttattcatcattgcccaaaattacaaactgcctaaatgtagaccttcatttagttaatgaatgcacaaactgtggtatatccaaacaattgaataaaaaaaggaatgaactggtacttttttctattcctcctgtttaagtacagccaaaacacctcaacatttgtataaaacatgagctgggctgggtgcggtggctcacacgtgtaatcccagcactttgggaggctgaggcgggtggatcacctaaggttgggagttcaagaccggtctgaccaacatggagaaaccctgtctcaactaaaaatacaagattagtcgggcatggtggcgcatgcctgtaatcccagcttcttgggaggctgaggcaggagaattgcttgatcccgggaagcgaaggttgcagtaagctgagattgcaccattgcactccagcctgggcaacaagagcaaaactctgtctcaaaaagaaaaaaaaaaccattcagctgaatctcaaaggcagagagaagacagactggctagggaccttggaaccagaggagcagtgtggtggggagtggactggattttctttttgcctcatttatcctggacttggtgctggagaagctatgggttcagaccaagagaaaaccccatgaaaagcctgctctctctagccaaaagaggcaacctagcaagataaaaacctttagataataagcacttgactccagtcaaacaaaacagaataaactggccccattcacccctgtcagcaaaggccaagtgggagccaagatatgtaccccaacctggaagtcataaggtacacttctcccctttcccagccaaggtggtgttagagaaggctgactggggagctgggattctcattccctccaggaggtgataacactcctttcacatggtgtcagtggtcacagggaggctgaacttccacccagtaatacataggcatctctctggctcctatatgggtgatgttggagaagaggccgagtagagaatccagactgttgctgacacccagcagtaacaaggacacctccacaatgtccgtggaggccatgtggagatcagtaacaaggcactgctctccctcccagtcagagagatgtcagtggaggactagggggctagaactcccatgtgcgttcagcagtaatccccatgaccgccactccttgacatcacaggccttgaagaaacctggactttcactcccctctggttgtagcgaggtggcactcccttttccctgttgccagtgctgtgtcagtggaggcttgctaaattggaagatgtaaataagattcacattctcataacataataccccaaattttcaggatttaattgaaaatcactaagctgggcatggtggctcacacctgtaatcccagcactttgggaggccaaggtgggccaaacacttaaggtcaggaattcaagaccagcctggccagcatggtgaaaccctgtctctactaaaaatacaaaaattagctgggcgtggtggcacatgcctgtaatcccagctactgggaaggctaaggcaggaaaatcactggaacctgggagacggaggttgcagtgatccaagatcgcactagtgtactgcagcctgggcaacagagcaagactccatctaaatttgtgtcaggattcccagaaggagatgagaaagggtggggctgaaaaaaattgaggaagaagtcatggctgaaaatttcccaaatttggcaaaagtcagaaacctacagattgaaaaagctgaatgaagctcaaatatgataaactcaaagaagttcacacagagacacatcacagtcagatttctgaacactgcagacaaaaaatgaagatctcgaaattagcaagaaatgaccttacctaagcaatttgaatgacagcagatttcccatcagagatcataaaggccagaaggaaggggtacatacaacattttttctagtgctgaaagacaaaaactctaggctgggcacggtggcacacacctgtaatcccagcacttttggaggctgaggcaggcagatcacctgaagtcaggagttcgagaccagcctggccaacatggggaaaccctgtctctactaaaaatacaaaaattagccaggtgtggtggcacgcacctataatcctagctacttgggaggctgaggcaggggaatcgcttgaacctgggaggcgacggttgcagtgagccaaggtcgcgccactgcactccagcctgggcagttgagcgagactccatctcaaaaaaaaaaaaattatccaggcttggtggtgggcgcctatagtcccagctacttgggaggctgaggcaagagaattggttgaacccaggaggtggaggttgcagtgagccaagctcatgccactgtactccagcctgggtgacagagcgagaccttgtctcaaaaaaaaaaaaaaaaaaaaaaaacaagaaaaaaactctaaacccagagttacatatccagtgaaatatccttcaggagtgaagggaaaattaacgatttgtcttcaggagacctaccctaaaagaatggctaaaggaatttctctaaacagaaaagaaatgataaaagaagtaattttggaacatcaggaaggaagaaagaacaataaaaagagtaaaatatgggtaaacacaatagactttcccctccttttgaattttctaaattgtatgatggttgaagcaagaattatagcactgatttggttttcagtatatatattggaaatatttaaggcattatgttacagatgaaggagggtcaaaggatataaagggaggtaacctttctatatttcttttgtactgatgcaggcactttggaaaataatttcactatttgtttaaaaactgaacataccctgaccatatgacatagcatctatactcctgggcatttatcccagagaaacagaaatttatttattttttttttagtattacactccgtaagtgctgtaatactagcacttagggaggctgaggcaagcagattgcttgagcccaggagttcaagaccagcctgggcaatgctgcacagtcaaaaaagaaaaacaaacatttagaaaactattttaaaagtctttaattgctgaatgcctctttggctaatatttggaagatcattattattatttttcttttttaggcagagtcttgctctgtcactgaggctggagtgcagtggcgccatctcggcttactgcaacctctgcctcccgggttcacgccattctcctgcctcagcctcccgagtagctgggactacaggcgtgtgccaccatgcccggctaattttttgtgtttttagtagagatggggtttcactatgttagtcaggatggtctccatctcctaacctcgtgatccgcccacctcggcttcccaaaatgctgggattacaggcgtgagccactgtgcccagcctggaagatcattatttagtcctacaactgacacattgttccactgacgcaattgcccaggctggtcttgaactcctgggctcaagcaatctgcctgcctcggcctccctaagtgctagtattacaggcttgagccactgtgcccagccaaaaatagaaatttatattctcacaaaaacatgtacatgaatgtttatagcagctttacttgtcataatcaaaaactggaaacaaccaaaatgtcctacagtgaaacaaactgtagtacatccatagcatgtaatactctactgtcaggattaaaaagaaacccactgttggcacaggcagcaccgtggctggatctcaggggcattatgctgagtgcaaaaaagcctcaaagggtcttacactgtatgattccacttgttcaactaaaaatgacagctgtatagagatagagaacatattagtggtttccactagttagagaaagtgggtaaaagataggtgggtgggaatataaatcgatagcagggagatctttgtggtattataacacttctatgtcttgattgtagtggtggtggttacatgaatacacgtgtgataaaatgccatgtagaactacatataacgttgtgccaatgtcaatatctaggttttagtttgatctttagttacataagatgtaactattgggtgaaattgggcaaaagagtacacgaaacctctcttaaatatctttacaacttcctttgaattgacagtttttcaaaatagaaagttgggtttttgtaaatacatgaattgttgatatacacaacaaatctcaaatgcattatgctacgtgaaagaagccatattcaaaaggctacatacctactgatgccttttatatgacgtgcaggaaaagataaaactgtaggacagagaatatactggtggctatctgggattaggaaatggggatcgaccacaaaggggcagcatgggggaattttctggggcaatggaatggttgtgtatcttgatggtgtatttgtcaaaatatatagaactataaaagtaaattttgctttatatgtattaaatcaaaaaaagaaactcgtgctcaaatagaaatacattttctgagaacttgccttttgatgactttgagaattttctggaaattttaaagaaatgtggttttgtttcccaacaggtgatgctatgagtgaagaagacatgcttcaggcagctgtgaccatgtctttagaaactgtcagaaatgatttgaaaacagaaggaaaaaaataatacctttaaaaaataatttagatattcatactttccaacattatcctgtgtgattacagcatagggtccactttggtaatgtgtcaaagagatgaggaaataagacttttagcggtttgcaaacaaaatgatgggaaagtggaacaatgcgtcggttgtaggactaaataatgatcttccaaatattagccaaagaggcattcagcaattaaagacatttaaaatagttttctaaatgtttctttttcttttttgagtgtgcaatatgtaacatgtctaaagttagggcatttttcttggatctttttgcagactagctaattagctctcgcctcaggctttttccatatagtttgttttctttttctgtcttgtaggtaagttggctcacatcatgtaatagtggctttcatttcttattaaccaaattaacctttcaggaaagtatctctactttcctgatgttgataatagtaatggttctagaaggatgaacagttctcccttcaactgtataccgtgtgctccagtgttttcttgtgttgttttctctgatcacaacttttctgctacctggttttcattattttcccacaattcttttgaaagatggtaatcttttctgaggtttagcgttttaagccctacgatgggatcattatttcatgactggtgcgttcctaaactctgaaatcagccttgcacaagtacttgagaataaatgagcattttttaaaatgtgtgagcatgtgctttcccagatgctttatgaatgtcttttcacttatatcaaaaccttacagctttgttgcaaccccttcttcctgcgccttattttttcctttcttctccaattgagaaaactaggagaagcatagtatgcaggcaagtctccttctgttagaagactaaacatacgtacccaccatgaatgtatgatacatgaaatttggccttcaattttaatagcagttttattttattttttctcctatgactggagctttgtgttctctttacagttgagtcatggaatgtaggtgtctgcttcacatcttttagtaggtatagcttgtcaaagatggtgatctggaacatgaaaataatttactaatgaaaatatgtttaaatttatactgtgatttgacacttgcatcatgtttagatagcttaagaacaatggaagtcacagtacttagtggatctataaataagaaagtccatagttttgataaatattctctttaattgagatgtacagagagtttcttgctgggtcaataggatagtatcattttggtgaaaaccatgtctctgaaattgatgttttagtttcagtgttccctatccctcattctccatctccttttgaagctcttttgaatgttgaattgttcataagctaaaatccaagaaatttcagctgacaacttcgaaaattataatatggtatattgccctcctggtgtgtggctgcacacattttatcagggaaagttttttgatctaggatttattgctaactaactgaaaagagaagaaaaaatatcttttatttatgattataaaatagctttttcttcgatataacagattttttaagtcattattttgtgccaatcagttttctgaagtttcccttacacaaaaggatagctttattttaaaatctaaagtttcttttaatagttaaaaatgtttcagaagaattataaaactttaaaactgcaagggatgttggagtttagtactactccctcaagatttaaaaagctaaatattttaagactgaacatttatgttaattattaccagtgtgtttgtcatattttccatggatatttgttcattacctttttccattgaaaagttacattaaacttttcatacacttgaattgatgagctacctaatataaaaatgagaaaaccaatatgcattttaaagttttaactttagagtttataaagttcatatataccctagttaaagcacttaagaaaatatggcatgtttgacttttagttcctagagagtttttgtttttgtttttgtttttttttgagacggagtcttgctatgtctcccaggctggagggcagtggcatgatctcggctcactacaacttccacctcccgggttcaagcaattctcctgcctcagcctccagagtagctgggattacaggcgcccaccaccacacccggcagatttttgtatttttggtagagacgcggtttcatcatgtttggccaggctggtctcgaactcctgacctcaggtgatccgcctgccttggcctcccaaagtgttgggattacaggcatgagccactgcgcctggccagctagagagtttttaaagcagagctgagcacacactggatgcgtttgaatgtgtttgtgtagtttgttgtgaaattgttacatttagcaggcagatccagaagcactagtgaactgtcatcttggtggggttggcttaaatttaattgactgtttagattccatttcttaattgattggccagtatgaaaagatgccagtgcaagtaaccatagtatcaaaaaagttaaaaattattcaaagctatagtttatacatcaggtactgccatttactgtaaaccacctgcaagaaagtcaggaacaactaaattcacaagaactgtcctgctaagaagtgtattaaagatttccattttgttttactaattgggaacatcttaatgtttaatatttaaactattggtatcatttttctaatgtataatttgtattactgggatcaagtatgtacagtggtgatgctagtagaagtttaagccttggaaataccactttcatattttcagatgtcatggatttaatgagtaatttatgtttttaaaattcagaatagttaatctctgatctaaaaccatcaatctatgttttttacggtaatcatgtaaatatttcagtaatataaactgtttgaaaaggctgctgcaggtaaactctatactaggatcttggccaaataatttacaattcacagaatattttatttaaggtggtgctttttttttttgtccttaaaacttgatttttcttaactttattcatgatgccaaagtaaatgaggaaaaaaactcaaaaccagttgagtatcattgcagacaaaactaccagtagtccatattgtttaatattaagttgaataaaataaattttatttcagtcagagcctaaatcacattttgattgtctgaatttttgatactatttttaaaatcatgctagtggcggctgggcgtggtagctcacgcctgtaatcccagcattttgggaggccgaagtgggtggatcacgaggtcgggagttcgagaccagcttggccaaaatggtgaaaccccatctgtactaaaaactacaaaaattagctgggcgcggtggcaggtgcctgtaatcccagctacctgggagtctgaggcaggagaattgcttgaaccctggcgacagaggatgcagtgagccaagatggtgccactgtactccagactgggcgacagagtgagactctgtctcaaaaaaaaaaaaaaaatcatgctagtgccaagagctactaaattcttaaaaccggcccattggacctgtacagataaaaaatagattcagtgcataatcaaaatatgataattttaaaatcttaagtagaaaaataaatcttgatgttttaaattcttacgaggattcaatagttaatattgatgatctcccggctgggtgcagtggctcacgcctgtaatcccagcagttctggaggctgaggtgggcgaatcacttcaggccaggagttcaagaccagtctgggcaacatggtgaaacctcgtttctactaaaaatacaaaaattagccgggcgtggttgcacacacttgtaatcccagctactcaggaggctaagaatcgcatgagcctaggaggcagaggttgcagagtgccaagggctcaccactgcattccagcctgcccaacagagtgagacactgtttctgaaaaaaaaaaatatatatatatatatatatatgtgtgtatatatatatgtatatatatatgacttcctattaaaaactttatcccagtcgggggcagtggctcacgcctgtaatcccaacactttgggaggctgaggcaggtggatcacctgaagtccggagtttgagaccagcctggccaacatggtgaaaccccatctctactaaaaatacaaaacttaagccaggtatggtggcgggcacctgtaatcccagttacttgggaggctgaggcaggagaatcgtttaaacccaggaggtggaggttgcagtgagctgagatcgtgccattgcactctagcctgggcaacaagagtaaaactccatcttaaaggtttgtttgtttttttttaatccggaaacgaagaggcgttgggccgctattttctttttctttctttctttctttctttttttttttttctgagacggagtctagctctgctgcccaggctggagtacaatgacacgatgttggctcactgcaacctccacctcctgggttcaagcgattctcctgcctcagcctcccaagtacctgggattacaggcacctgccactacacctggcgaatatttgttttttttagtagagacgggcttttaccatgttaggctggtctcaaactcctgacctcaggtgatctgcctgccttggcctcccaaagtgctgggattacaggtgcaggccaccacacccggccttgggccactgttttcaaagtgaattgtttgttgtatcgagtccttaagtatggatatatatgtgaccctaattaagaactaccagattggatcaactaatcatgtcagcaatgtaaataactttatttttcatattcaaaataaaaactttcttttatttctggcccctttataaccagcatctttttgctttaaaaaatgacctggctttgtatttttttagtcttaaacataataaaaatatttttgttctaatttgctttcatgagtgaagattattgacatcgttggtaaattctagaattttgattttgttttttaatttgaagaaaatctttgctattattattttttccaagtggtctggcattttaagaattagtgctaataacgtaacttctaaatttgtcgtaattggcatgtttaatagcatatcaaaaaacattttaagcctgtggattcatagacaaagcaatgagaaacattagtaaaatataaatggatattcctgatgcatttaggaagctctcaattgtctcttgcatagttcaaggaatgttttctgaatttttttaatgctttttttttttttgaaagaggaaaacatacatttttaaatgtgattatctaatttttacaacactgggctattaggaataactttttaaaaattactgttctgtataaatatttgaaattcaagtacagaaaatatctgaaacaaaaagcattgttgtttggccatgatacaagtgcactgtggcagtgccgcttgctcaggacccagccctgcagcccttctgtgtgtgctccctcgttaagttcatttgctgttattacacacacaggccttcctgtctggtcgttagaaaagccgggcttccaaagcactgttgaacacaggattctgttgttagtgtggatgttcaatgagttgtattttaaatatcaaagattattaaataaagataatgtttgcttttctatttccttttgaatttgtgtttattgttaattcatagctattcaaagtgtgattagagctgggcttggtggcttgcatctacagttccagctacccaggaggcagaagcaggaggattgcttgagcctaggagttcgaggctgcagtgagctatgatcctgccactgaattctagcctgggcgacaaaacaggaaaaaagtatggatggaggaccagcagcatctgtatcacctgtgagtctttcagaaatgcagagtttcaggctacactcggacctactgaatcagaacttgcactttttacaagatccccaggacactaaagtatagagtgaagcttgagaagcgctgttgtgtggattgttcttaaccagctgcagtgatgaatatgaataacgcaggccagcacagtccattgatattctattccagcttactgcctgccaaaaggtccattattactggatcctcagtcttttccaagagaagctaagaattccaaatttttatttgaaatatattttttaaatgtttgttcaactggcccagtgccagtggctcatgcctttaatcctagcactttgagaggccgaggtggaaggatcacttgaccccaggagtttgagaccagcctgggcaacataaagagaccccatctctattaaaaaaaaatagagacaatgctgccttaaaaaagtcaaataaatgtttgctcaactgatttttaatactgagggccaaacaaagcacatcaaatttttaagtgctgcttttcctcattttatccaactctggacaccagaatccaaatgtagtgattggaatccacctagactgattgaggaatatattgtcctcaaattttatgagggttgactattcattttaactttaattaggattgggcacaaattttgaaacataataacattacaggaccggggcccgatccagaccccaagagagggttcttggatcttgtgcaagaatgaattcagggcaagtccataaattgaaagctagttcattaagaaagtagaggaataaaagaatggctaccccataggtagagcagccctgagggctgctggttgccatgtccacccccgcgccccctccccccgctttgttgttgttgtttaagacagagcttcgctgtgtcatcaggctggagtgcagtggcatgatagctcactgcaacctctgcctcccgcgttcaagcaattctcctgcctcagcctcctgagtagctgggactacaggcgtgcaccaccacgcccagctaatttttgtatttttagtagagatgcggtttcaccatgttggccaggaaggtctcaatctcttgacttcgtgatccacccgccttggcctcccaaagtgctgggatgagccacctcgcctggctggttatttcttgatgatatgctaaacaaggggtggattattcatgcctgccctttttagaccatttagggtaacttcccggcattgccatggcatttgtcaactgtcatggtgccaatgggagtgtagcagtgaggaggaccagaggtcactttcatcaccattttggctttttcagccggcttctttactgcaacctgttttatcagcaaggtttttatgatctgtatcttgtgcagaccttctatctcatcctgtgacttagaatgccttaaccatctgggaatgcagcctagtaggtcttggcctcattttaccaaccccctattcaagatggagttgctctggttcaaatgcctctgatatttccctactcccttttataagaaaacccttaatcctaagggttgcagagggatgaagatccatcttctgtattcttcaggctgaataggggtgatgatattcctgcctatgagagtctcttgtattagggtagagaggagctcagtcagtcagtatggctccctatccttcctcccttccccagcccctgacaactaccattctactttgtctctatgattctaagtatctcctataagtggaatcattcagtatttgtagggtttttttgtgactagtgtatttcacttagcatgtcaaggttcatccatgttgtagcatacgtccaaattttcttctttttaaaaactgaataatattccattgtatgatatatgcacattttgcttattcatttatccatcaaagaaaaccagtagcttttttacataccggcagtaacctggttaaaaaaataagatggaaaataccaagcccgaaaatgtcaaattcttgaataccagacaggtactataatccaagctgagcagagaggaatggcccttgtctcagccctgagccacatgtcactacatgggccccaaggagctcttgtgcccagagtcctgctaaggctcgttcttcacccctctaaagtggctcaaactagcgtaggaggccaggagggagcagattctatgccacctccattgcttccgtgccttctccagatccattttttccaaaagctgtgtttgaattctgcacaggggcatctctgtctccaacactgaaacccc

(The sequence listing continues in the following parts.)

1. An oligomeric compound comprising a modified oligonucleotide consisting of 16-20 linked nucleosides, wherein:
each nucleoside of the modified oligonucleotide is either a sugar-modified nucleoside or a DNA nucleoside, provided that not more than 4 nucleosides are DNA nucleosides, and wherein at least one sugar-modified nucleoside comprises a 2′-MOE sugar moiety, a cEt sugar moiety, or a 2′-OMe sugar moiety; and
the modified oligonucleotide comprises 1-4 blocks of phosphodiester linkages, wherein each block of phosphodiester linkages consists of a single phosphodiester linkage or of 2-4 contiguous phosphodiester linkages; and wherein each of the remaining internucleoside linkages is a phosphorothioate linkage.

2. The oligomeric compound of claim 1, wherein 1, 2, 3, or 4 nucleosides of the modified oligonucleotide are DNA nucleosides.

3.-6. (canceled)

7. The oligomeric compound of claim 1, wherein
(a) the 5′ terminal nucleoside of the modified oligonucleotide is a DNA nucleoside;
(b) the 3′ terminal nucleoside of the modified oligonucleotide is a DNA nucleoside;
(c) the 5′ penultimate nucleoside of the modified oligonucleotide is a DNA nucleoside; and/or
(d) the 3′ penultimate nucleoside of the modified oligonucleotide is a DNA nucleoside.

8.-24. (canceled)

25. The oligomeric compound of claim 1, wherein the modified oligonucleotide has a sugar motif (5′ to 3′) selected from: eeeeeeeeeeeeeeeeeeee, eeeeeeeeeeeeeeeeeee, eeeeeeeeeeeeeeeeee, eeeeeeeeeeeeeeeee, eeeeeeeeeeeeeeee, nennnnnnnneennnnnnnnn, nennnnnnnnnnnnennnneen, nennnnnneneenenneen, nnnnnnnnnnnnnnnnnnndd, nnnnnnnnnnnnnnnnnnned,nnnnnnnnnnnnnnnnnnnde, nnnnnnnnnnnnnnnnnnnee, eeeeeeeeeeeeeeeeeedd, eeeeeeeeeeeeeeeeeeed, eeeeeeeeeeeeeeeeeede, eeeeeeeeeeeeeeeeeed, keekeekeekeekeeeek, keeekeeekeeekeeeek, keeeeekeeeeekeeeek, keeeeeeekeeeeeeeek, keeeeeeeeeeeeeeeek, eeekeekeekeekeekek, eeekeekeekeekeekee, eeeeeekeekeekeekee, eeeeeekeekeekeeeee, eeeeeekeeeeekeeeee, keekeekeekeeeeeeee, eeeeeeeekeekeekeek, keekeekeeeeeeeeeee, eeeeeeeeeeekeekeek, keekeeeeeeeeeeeeee, eeeeeeeeeeeeeekeek, keekeekeekeekeeek, keeekeeekeeekeeek, keeeekeeeeekeeeek, keeeeeeekeeeeeeek, keeeeeeeeeeeeeeek, eekeekeekeekeekek, eekeekeekeekeekee, eeeeekeekeekeekee, eeeeekeekeekeeeee, eeeeekeeeeekeeeee, keekeekeekeeeeeee, eeeeeeekeekeekeek, keekeekeeeeeeeeee, eeeeeeeeeekeekeek, keekeeeeeeeeeeeee, eeeeeeeeeeeeekeek, keekeekeekeekeek, keeekeeekeeekeek, keeeekeeeekeeeek, keeeeeeekeeeeeek, keeeeeeeeeeeeeek, kekeekeekeekeeke, eekeekeekeekeeke, eeeeekeekeekeeke, eeeeekeekeekeeee, eeeeekeeeeekeeee, keekeekeekeeeeee, eeeeeekeekeekeek, keekeekeeeeeeeee, eeeeeeeeekeekeek, keekeeeeeeeeeeee, eeeeeeeeeeeekeek, eeeeeeeeeeeeeeeeeed, eeeeeeeeeeeeeeeeeey, and ennnnnnnnnnnnnnnnnne; wherein ‘e’ represents a 2′-MOE sugar moiety, ‘n’ represents a 2′-NMA sugar moiety, ‘k’ represents a cEt sugar moiety, ‘d’ represents a 2′-β-D-deoxyribosyl sugar moiety, and ‘y’ represents a 2′-OMe sugar moiety; and/or
wherein the modified oligonucleotide has an internucleoside linkage motif (5′ to 3′) selected from: sososssssssssssss, ssosssssssssssoss, ssosssssosssssoss, ssosssosssosssoss, soossssssssssooss, sooosssssssssooss, sooossssssssoooss, sssssssooosssssss, ssossssssssssssss, ssssossssssssssss, ssssssossssssssss, ssssssssossssssss, ssssssssssossssss, ssssssssssssossss, ssssssssssssssoss, sossssssssssSsoss, sosssssssssosssss, sosssssssosssssss, soSssssosssssssss, soSssosssssssssss, ssssosssssssssoss, ssssssosssssssoss, ssssssssosssssoss, ssssssssssosSsoss, ssssssssssssososs, soossssssssssssss, sssoossssssssssss, sssssoossssssssss, sssssssoossssssss, sssssssssoossssss, sssssssssssoossss, sssssssssssssooss, sssssssoooossssss, ssoooosssssssssss, ssssoooosssssssss, ssssssssoooosssss, ssssssssssoooosss, sssssssssssooooss, ssssssooooossssss, ssssssoooooosssss, soooosssssssoooss, sssssooooooosssss, ssssssssssssssoss, ssssssssssssosss, sssssssssssssooss, ssssssssssssososs, sssssssssssosssss, sssssssssssososss, ssssssssssossosss, sssssssssossssssS, sssssssssosssosss, ssssssssosssssoss, ssssssssossssosss, sssssssossssssssS, sssssssoossssssss, sssssosssssssssss, sssosssssssssssss, sosssssssssssssss, sosssssSossssssss, soossssssssssssss, ossssssssssssssssso, sssssssssssssssssoo, ssssssssssssssssoss, sssssssssssssssooss, ssssssssssssssososs, sssssssssosssssssss, sssssssssossssssoss, ssssssssoosssssssss, sosssssssssssssssss, sossssssssssssssoss, sosssssssosssssssss, sososssssssssssssss, soossssssssssssssss, sssssssssssssssssss, ssssssssssssssssso, ossssssssssssssssss, ssssssssssssososso, sssssssssssssssoss, sssssssssssssososs, ssssssssosssssssss, ssssssssossssssoss, sossssssssssssssss, sosssssssssssssoss, sossssssosssssssss, sosossssssssssssss, ssssssssssooooss, ssssssssoooossss, sssssssooossssss, ssssssoooossssss, ssssssooooosssss, sssssoooooosssss, sssssooooooossss, ssssoooossssssss, ssossssssssssoss, ssosssssossssoss, ssosssosssossoss, ssossossossososs, ssososososososss, ssoooossssssssss, soosssssssssooss, sooossssssssooss, sooosssssssoooss, soooossssssoooss, sssssssssooooss, ssssssssoooosss, ssssssooossssss, ssssssoooosssss, sssssooooosssss, sssssoooooossss, ssssoooosssssss, ssssooooooossss, sssosssosssosss, ssosssssssssoss, ssossossossosss, ssossossosososs, ssososososososs, ssoooosssssssss, soossssssssooss, sooosssssssooss, sooossssssoooss, and soooosssssoooss; wherein, ‘s’ represents a phosphorothioate internucleoside linkage and ‘o’ represents a phosphodiester internucleoside linkage.

26. The oligomeric compound of claim 1, wherein the modified oligonucleotide comprises 1, 2, 3, or 4 blocks of phosphodiester linkages.

27.-56. (canceled)

57. The oligomeric compound of claim 1 comprising a conjugate group.

58.-61. (canceled)

62. The oligomeric compound of claim 1, wherein the nucleobase sequence of the modified oligonucleotide is complementary to a splice modulation site of a pre-mRNA.

63.-68. (canceled)

69. The oligomeric compound of claim 62, wherein the pre-mRNA is selected from SMN2, SCN1A, DMD, APP, ATXN3, SmgGDS, PK-M, PK-M1, PK-M2, MAPT, LRP8, CLN3, IKBKAP, USH1C, LMNA, dysferlin, TGFBR1, C5, PKD1, ATXN1, ATXN7, CACNA1A, HTT, ATN1, TBP, or IL-1RAP.

70. (canceled)

71. (canceled)

72. An oligomeric compound comprising a modified oligonucleotide consisting of 16-20 linked nucleosides, wherein:
each nucleoside of the modified oligonucleotide is either a sugar-modified nucleoside or a DNA nucleoside, provided that not more than 4 nucleosides are DNA nucleosides, and at least one sugar-modified nucleoside comprises a 2′-MOE sugar moiety; and
each internucleoside linkage is either a phosphorothioate internucleoside linkage or a phosphodiester internucleoside linkage.

73. (canceled)

74. The oligomeric compound of claim 72, wherein the modified oligonucleotide has an internucleoside linkage motif (5′ to 3′) selected from: sososssssssssssss, ssosssssssssssoss, ssosssssosssssoss, ssosssosssosssoss, soossssssssssooss, sooosssssssssooss, sooossssssssoooss, sssssssooosssssss, ssossssssssssssss, ssssossssssssssss, ssssssossssssssss, ssssssssossssssss, ssssssssssossssss, ssssssssssssossss, ssssssssssssssoss, sossssssssssssoss, sosssssssssosssss, sosssssssosssssss, sosssssosssssssss, sosssosssssssssss, ssssosssssssssoss, ssssssosssssssoss, ssssssssosssssoss, ssssssssssosssoss, ssssssssssssososs, soossssssssssssss, sssoossssssssssss, sssssoossssssssss, sssssssoossssssss, sssssssssoossssss, sssssssssssoossss, sssssssssssssooss, sssssssoooossssss, ssoooosssssssssss, ssssoooosssssssss, ssssssssoooosssss, ssssssssssoooosss, sssssssssssooooss, ssssssooooossssss, ssssssoooooosssss, soooosssssssoooss, sssssooooooosssss, ssssssssssssssoss, ssssssssssssosss, sssssssssssssooss, ssssssssssssososs, sssssssssssosssss, sssssssssssososss, ssssssssssossosss, sssssssssosssssss, sssssssssosssosss, ssssssssosssssoss, ssssssssossssosss, sssssssosssssssss, sssssssoossssssss, sssssosssssssssss, sssosssssssssssss, sosssssssssssssss, sossssssossssssss, soossssssssssssss, ossssssssssssssssso, sssssssssssssssssoo, ssssssssssssssssoss, sssssssssssssssooss, ssssssssssssssososs, sssssssssosssssssss, sssssssssossssssoss, ssssssssoosssssssss, sosssssssssssssssss, sossssssssssssssoss, sosssssssosssssssss, sososssssssssssssss, soossssssssssssssss, sssssssssssssssssss, ssssssssssssssssso, ossssssssssssssssss, ssssssssssssososso, sssssssssssssssoss, sssssssssssssososs, ssssssssosssssssss, ssssssssossssssoss, sossssssssssssssss, sosssssssssssssoss, sossssssosssssssss, sosossssssssssssss, ssssssssssooooss, ssssssssoooossss, sssssssooossssss, ssssssoooossssss, ssssssooooosssss, sssssoooooosssss, sssssooooooossss, ssssoooossssssss, ssossssssssssoss, ssosssssossssoss, ssosssosssossoss, ssossossossososs, ssososososososss, ssoooossssssssss, soosssssssssooss, sooossssssssooss, sooosssssssoooss, soooossssssoooss, sssssssssooooss, ssssssssoooosss, ssssssooossssss, ssssssoooosssss, sssssooooosssss, sssssoooooossss, ssssoooosssssss, ssssooooooossss, sssosssosssosss, ssosssssssssoss, ssossossossosss, ssossossosososs, ssososososososs, ssoooosssssssss, soossssssssooss, sooosssssssooss, sooossssssoooss, and soooosssssoooss; wherein, ‘s’ represents a phosphorothioate internucleoside linkage and ‘o’ represents a phosphodiester internucleoside linkage; and/or
wherein the modified oligonucleotide has a sugar motif (5′ to 3′) selected from: eeeeeeeeeeeeeeeeeeee, eeeeeeeeeeeeeeeeeee, eeeeeeeeeeeeeeeeee, eeeeeeeeeeeeeeeee, eeeeeeeeeeeeeeee, nennnnneneennnnnnn, nnnnnnnnnnnnenneen, nennnnneneenenneen, nnnnnnnnnnnnnnnnnned, nnnnnnnnnnnnnnnnnnde, nnnnnnnnnnnnnnnnnnee, eeeeeeeeeeeeeeeeeedd, eeeeeeeeeeeeeeeeeeed, eeeeeeeeeeeeeeeeeede, eeeeeeeeeeeeeeeeeed, keekeekeekeekeeeek, keeekeeekeeekeeeek, keeeeekeeeeekeeeek, keeeeeeekeeeeeeeek, keeeeeeeeeeeeeeeek, eeekeekeekeekeekek, eeekeekeekeekeekee, eeeeeekeekeekeekee, eeeeeekeekeekeeeee, eeeeeekeeeeekeeeee, keekeekeekeeeeeeee, eeeeeeeekeekeekeek, keekeekeeeeeeeeeee, eeeeeeeeeeekeekeek, keekeeeeeeeeeeeeee, eeeeeeeeeeeeeekeek, keekeekeekeekeeek, keeekeeekeeekeeek, keeeekeeeeekeeeek, keeeeeeekeeeeeeek, keeeeeeeeeeeeeeek, eekeekeekeekeekek, eekeekeekeekeekee, eeeeekeekeekeekee, eeeeekeekeekeeeee, eeeeekeeeeekeeeee, keekeekeekeeeeeee, eeeeeeekeekeekeek, keekeekeeeeeeeeee, eeeeeeeeeekeekeek, keekeeeeeeeeeeeee, eeeeeeeeeeeeekeek, keekeekeekeekeek, keeekeeekeeekeek, keeeekeeeekeeeek, keeeeeeekeeeeeek, keeeeeeeeeeeeeek, kekeekeekeekeeke, eekeekeekeekeeke, eeeeekeekeekeeke, eeeeekeekeekeeee, eeeeekeeeeekeeee, keekeekeekeeeeee, eeeeeekeekeekeek, keekeekeeeeeeeee, eeeeeeeeekeekeek, keekeeeeeeeeeeee, eeeeeeeeeeeekeek, eeeeeeeeeeeeeeeeeed, eeeeeeeeeeeeeeeeeey, and ennnnnnnnnnnnnnnnnne; wherein ‘e’ represents a 2′-MOE sugar moiety, ‘n’ represents a 2′-NMA sugar moiety, ‘k’ represents a cEt sugar moiety, ‘d’ represents a 2′-β-D-deoxyribosyl sugar moiety, and ‘y’ represents a 2′-OMe sugar moiety.

75.-77. (canceled)

78. The oligomeric compound of claim 72, comprising a conjugate group.

79. (canceled)

80. (canceled)

81. The oligomeric compound of claim 78, wherein the conjugate group comprises a lipid or lipophilic group, a carbohydrate, an antibody, a peptide, or a protein.

82. The oligomeric compound of claim 72, wherein the nucleobase sequence of the modified oligonucleotide is complementary to a pre-mRNA.

83.-86. (canceled)

87. The oligomeric compound of claim 82, wherein the pre-mRNA is selected from SMN2, SCN1A, DMD, APP, ATXN3, SmgGDS, PK-M, PK-M1, PK-M2, MAPT, LRP8, CLN3, IKBKAP, USH1C, LMNA, dysferlin, TGFBR1, C5, PKD1, ATXN1, ATXN7, CACNA1A, HTT, ATN1, TBP, or IL-1RAP.

88.-91. (canceled)

92. A method comprising contacting a cell with the oligomeric compound of claim 1.

93. A method of modulating splicing of a pre-mRNA in a cell comprising contacting the cell with an oligomeric compound comprising a modified oligonucleotide consisting of 16-20 linked nucleosides, wherein:
(a) each nucleoside of the modified oligonucleotide is either a sugar-modified nucleoside or a DNA nucleoside, provided that not more than 4 nucleosides are DNA nucleosides; and
(b) each internucleoside linkage is either a phosphorothioate internucleoside linkage or a phosphodiester internucleoside linkage:
thereby modulating splicing of the pre-mRNA in the cell, wherein the pre-mRNA is selected from SMN2, SCN1A, DMD, APP, ATXN3, SmgGDS, PK-M, PK-M1, PK-M2, MAPT, LRP8, CLN3, IKBKAP, USH1C, LMNA, dysferlin, TGFBR1, C5, PKD1, ATXN1, ATXN7, CACNA1A, HTT, ATN1, TBP, or IL-1RAP.

94. The method of claim 93, wherein the modulating of the pre-mRNA
(a) is inducing exon skipping in the pre-mRNA;
(b) is inducing intron retention: or
(c) results in alternative splicing.

95. (canceled)

96. (canceled)

97. The method of claim 93, wherein the resulting mRNA is a substrate for nonsense mediated decay.

98. The method of claim 93, wherein in the cell is in an animal.

99. (canceled)

100. (canceled)

101. A method of treating a disease or condition in an animal comprising administering to an animal the oligomeric compound of claim 1 and thereby treating the disease or condition in the animal.

102-108. (canceled)
